United States Patent Application Publication US 2024/0084334 A1 - sequence listing, part 7

SEQ ID NO: 24194 - RNA, 125 nt, synthetic construct
  source 1..125: mol_type = other RNA
  modified_base 1: mod_base = OTHER; note = 2'O-methyl guanosine phosphorothioate
  modified_base 2: mod_base = OTHER; note = 2'O-methyl guanosine phosphorothioate
  modified_base 3: mod_base = OTHER; note = 2'O-methyl cytidine phosphorothioate
  modified_base 122: mod_base = OTHER; note = adenosine phosphorothioate
  modified_base 123: mod_base = OTHER; note = 2'O-methyl guanosine phosphorothioate
  modified_base 124: mod_base = OTHER; note = 2'O-methyl cytidine phosphorothioate
  modified_base 125: mod_base = OTHER; note = 2'O-methyl adenosine
ggctgtgctgaccatcgacagttttagagctagaaatagcaagttaaaataaggctagtccgttatcaacttgaaaaagtggcaccgagtcggtgcttcagtccctttctcgtcgatggtcagca

SEQ ID NO: 24195 - RNA, 124 nt, synthetic construct
  source 1..124: mol_type = other RNA
  modified_base 1: mod_base = OTHER; note = 2'O-methyl guanosine phosphorothioate
  modified_base 2: mod_base = OTHER; note = 2'O-methyl guanosine phosphorothioate
  modified_base 3: mod_base = OTHER; note = 2'O-methyl cytidine phosphorothioate
  modified_base 121: mod_base = OTHER; note = cytidine phosphorothioate
  modified_base 122: mod_base = OTHER; note = 2'O-methyl adenosine phosphorothioate
  modified_base 123: mod_base = OTHER; note = 2'O-methyl guanosine phosphorothioate
  modified_base 124: mod_base = OTHER; note = 2'O-methyl cytidine
ggctgtgctgaccatcgacagttttagagctagaaatagcaagttaaaataaggctagtccgttatcaacttgaaaaagtggcaccgagtcggtgcttcagtccctttctcgtcgatggtcagc

SEQ ID NO: 24196 - RNA, 123 nt, synthetic construct
  source 1..123: mol_type = other RNA
  modified_base 1: mod_base = OTHER; note = 2'O-methyl guanosine phosphorothioate
  modified_base 2: mod_base = OTHER; note = 2'O-methyl guanosine phosphorothioate
  modified_base 3: mod_base = OTHER; note = 2'O-methyl cytidine phosphorothioate
  modified_base 120: mod_base = OTHER; note = uridine phosphorothioate
  modified_base 121: mod_base = OTHER; note = 2'O-methyl cytidine phosphorothioate
  modified_base 122: mod_base = OTHER; note = 2'O-methyl adenosine phosphorothioate
  modified_base 123: mod_base = OTHER; note = 2'O-methyl guanosine
ggctgtgctgaccatcgacagttttagagctagaaatagcaagttaaaataaggctagtccgttatcaacttgaaaaagtggcaccgagtcggtgcttcagtccctttctcgtcgatggtcag

SEQ ID NO: 24197 - RNA, 122 nt, synthetic construct
  source 1..122: mol_type = other RNA
  modified_base 1: mod_base = OTHER; note = 2'O-methyl guanosine phosphorothioate
  modified_base 2: mod_base = OTHER; note = 2'O-methyl guanosine phosphorothioate
  modified_base 3: mod_base = OTHER; note = 2'O-methyl cytidine phosphorothioate
  modified_base 119: mod_base = OTHER; note = guanosine phosphorothioate
  modified_base 120: mod_base = OTHER; note = 2'O-methyl uridine phosphorothioate
  modified_base 121: mod_base = OTHER; note = 2'O-methyl cytidine phosphorothioate
  modified_base 122: mod_base = OTHER; note = 2'O-methyl adenosine
ggctgtgctgaccatcgacagttttagagctagaaatagcaagttaaaataaggctagtccgttatcaacttgaaaaagtggcaccgagtcggtgcttcagtccctttctcgtcgatggtca

SEQ ID NO: 24198 - RNA, 121 nt, synthetic construct
  source 1..121: mol_type = other RNA
  modified_base 1: mod_base = OTHER; note = 2'O-methyl guanosine phosphorothioate
  modified_base 2: mod_base = OTHER; note = 2'O-methyl guanosine phosphorothioate
  modified_base 3: mod_base = OTHER; note = 2'O-methyl cytidine phosphorothioate
  modified_base 118: mod_base = OTHER; note = guanosine phosphorothioate
  modified_base 119: mod_base = OTHER; note = 2'O-methyl guanosine phosphorothioate
  modified_base 120: mod_base = OTHER; note = 2'O-methyl uridine phosphorothioate
  modified_base 121: mod_base = OTHER; note = 2'O-methyl cytidine
ggctgtgctgaccatcgacagttttagagctagaaatagcaagttaaaataaggctagtccgttatcaacttgaaaaagtggcaccgagtcggtgcttcagtccctttctcgtcgatggtc

SEQ ID NO: 24199 - RNA, 127 nt, synthetic construct
  source 1..127: mol_type = other RNA
  modified_base 1: mod_base = OTHER; note = 2'O-methyl guanosine phosphorothioate
  modified_base 2: mod_base = OTHER; note = 2'O-methyl guanosine phosphorothioate
  modified_base 3: mod_base = OTHER; note = 2'O-methyl cytidine phosphorothioate
  modified_base 124: mod_base = OTHER; note = adenosine phosphorothioate
  modified_base 125: mod_base = OTHER; note = 2'O-methyl guanosine phosphorothioate
  modified_base 126: mod_base = OTHER; note = 2'O-methyl cytidine phosphorothioate
  modified_base 127: mod_base = OTHER; note = 2'O-methyl cytidine
ggctgtgctgaccatcgacagttttagagctagaaatagcaagttaaaataaggctagtccgttatcaacttgaaaaagtggcaccgagtcggtgcagtccctttctcgtcgatggtcagcacagcc

SEQ ID NO: 24200 - RNA, 126 nt, synthetic construct
  source 1..126: mol_type = other RNA
  modified_base 1: mod_base = OTHER; note = 2'O-methyl guanosine phosphorothioate
  modified_base 2: mod_base = OTHER; note = 2'O-methyl guanosine phosphorothioate
  modified_base 3: mod_base = OTHER; note = 2'O-methyl cytidine phosphorothioate
  modified_base 123: mod_base = OTHER; note = cytidine phosphorothioate
  modified_base 124: mod_base = OTHER; note = 2'O-methyl adenosine phosphorothioate
  modified_base 125: mod_base = OTHER; note = 2'O-methyl guanosine phosphorothioate
  modified_base 126: mod_base = OTHER; note = 2'O-methyl cytidine
ggctgtgctgaccatcgacagttttagagctagaaatagcaagttaaaataaggctagtccgttatcaacttgaaaaagtggcaccgagtcggtgcagtccctttctcgtcgatggtcagcacagc

SEQ ID NO: 24201 - RNA, 125 nt, synthetic construct
  source 1..125: mol_type = other RNA
  modified_base 1: mod_base = OTHER; note = 2'O-methyl guanosine phosphorothioate
  modified_base 2: mod_base = OTHER; note = 2'O-methyl guanosine phosphorothioate
  modified_base 3: mod_base = OTHER; note = 2'O-methyl cytidine phosphorothioate
  modified_base 122: mod_base = OTHER; note = adenosine phosphorothioate
  modified_base 123: mod_base = OTHER; note = 2'O-methyl cytidine phosphorothioate
  modified_base 124: mod_base = OTHER; note = 2'O-methyl adenosine phosphorothioate
  modified_base 125: mod_base = OTHER; note = 2'O-methyl guanosine
ggctgtgctgaccatcgacagttttagagctagaaatagcaagttaaaataaggctagtccgttatcaacttgaaaaagtggcaccgagtcggtgcagtccctttctcgtcgatggtcagcacag

SEQ ID NO: 24202 - RNA, 124 nt, synthetic construct
  source 1..124: mol_type = other RNA
  modified_base 1: mod_base = OTHER; note = 2'O-methyl guanosine phosphorothioate
  modified_base 2: mod_base = OTHER; note = 2'O-methyl guanosine phosphorothioate
  modified_base 3: mod_base = OTHER; note = 2'O-methyl cytidine phosphorothioate
  modified_base 121: mod_base = OTHER; note = cytidine phosphorothioate
  modified_base 122: mod_base = OTHER; note = 2'O-methyl adenosine phosphorothioate
  modified_base 123: mod_base = OTHER; note = 2'O-methyl cytidine phosphorothioate
  modified_base 124: mod_base = OTHER; note = 2'O-methyl adenosine
ggctgtgctgaccatcgacagttttagagctagaaatagcaagttaaaataaggctagtccgttatcaacttgaaaaagtggcaccgagtcggtgcagtccctttctcgtcgatggtcagcaca

SEQ ID NO: 24203 - RNA, 123 nt, synthetic construct
  source 1..123: mol_type = other RNA
  modified_base 1: mod_base = OTHER; note = 2'O-methyl guanosine phosphorothioate
  modified_base 2: mod_base = OTHER; note = 2'O-methyl guanosine phosphorothioate
  modified_base 3: mod_base = OTHER; note = 2'O-methyl cytidine phosphorothioate
  modified_base 120: mod_base = OTHER; note = guanosine phosphorothioate
  modified_base 121: mod_base = OTHER; note = 2'O-methyl cytidine phosphorothioate
  modified_base 122: mod_base = OTHER; note = 2'O-methyl adenosine phosphorothioate
  modified_base 123: mod_base = OTHER; note = 2'O-methyl cytidine
ggctgtgctgaccatcgacagttttagagctagaaatagcaagttaaaataaggctagtccgttatcaacttgaaaaagtggcaccgagtcggtgcagtccctttctcgtcgatggtcagcac

SEQ ID NO: 24204 - RNA, 122 nt, synthetic construct
  source 1..122: mol_type = other RNA
  modified_base 1: mod_base = OTHER; note = 2'O-methyl guanosine phosphorothioate
  modified_base 2: mod_base = OTHER; note = 2'O-methyl guanosine phosphorothioate
  modified_base 3: mod_base = OTHER; note = 2'O-methyl cytidine phosphorothioate
  modified_base 119: mod_base = OTHER; note = adenosine phosphorothioate
  modified_base 120: mod_base = OTHER; note = 2'O-methyl guanosine phosphorothioate
  modified_base 121: mod_base = OTHER; note = 2'O-methyl cytidine phosphorothioate
  modified_base 122: mod_base = OTHER; note = 2'O-methyl adenosine
ggctgtgctgaccatcgacagttttagagctagaaatagcaagttaaaataaggctagtccgttatcaacttgaaaaagtggcaccgagtcggtgcagtccctttctcgtcgatggtcagca

SEQ ID NO: 24205 - RNA, 121 nt, synthetic construct
  source 1..121: mol_type = other RNA
  modified_base 1: mod_base = OTHER; note = 2'O-methyl guanosine phosphorothioate
  modified_base 2: mod_base = OTHER; note = 2'O-methyl guanosine phosphorothioate
  modified_base 3: mod_base = OTHER; note = 2'O-methyl cytidine phosphorothioate
  modified_base 118: mod_base = OTHER; note = cytidine phosphorothioate
  modified_base 119: mod_base = OTHER; note = 2'O-methyl adenosine phosphorothioate
  modified_base 120: mod_base = OTHER; note = 2'O-methyl guanosine phosphorothioate
  modified_base 121: mod_base = OTHER; note = 2'O-methyl cytidine
ggctgtgctgaccatcgacagttttagagctagaaatagcaagttaaaataaggctagtccgttatcaacttgaaaaagtggcaccgagtcggtgcagtccctttctcgtcgatggtcagc

SEQ ID NO: 24206 - RNA, 120 nt, synthetic construct
  source 1..120: mol_type = other RNA
  modified_base 1: mod_base = OTHER; note = 2'O-methyl guanosine phosphorothioate
  modified_base 2: mod_base = OTHER; note = 2'O-methyl guanosine phosphorothioate
  modified_base 3: mod_base = OTHER; note = 2'O-methyl cytidine phosphorothioate
  modified_base 117: mod_base = OTHER; note = uridine phosphorothioate
  modified_base 118: mod_base = OTHER; note = 2'O-methyl cytidine phosphorothioate
  modified_base 119: mod_base = OTHER; note = 2'O-methyl adenosine phosphorothioate
  modified_base 120: mod_base = OTHER; note = 2'O-methyl guanosine
ggctgtgctgaccatcgacagttttagagctagaaatagcaagttaaaataaggctagtccgttatcaacttgaaaaagtggcaccgagtcggtgcagtccctttctcgtcgatggtcag

SEQ ID NO: 24207 - RNA, 119 nt, synthetic construct
  source 1..119: mol_type = other RNA
  modified_base 1: mod_base = OTHER; note = 2'O-methyl guanosine phosphorothioate
  modified_base 2: mod_base = OTHER; note = 2'O-methyl guanosine phosphorothioate
  modified_base 3: mod_base = OTHER; note = 2'O-methyl cytidine phosphorothioate
  modified_base 116: mod_base = OTHER; note = guanosine phosphorothioate
  modified_base 117: mod_base = OTHER; note = 2'O-methyl uridine phosphorothioate
  modified_base 118: mod_base = OTHER; note = 2'O-methyl cytidine phosphorothioate
  modified_base 119: mod_base = OTHER; note = 2'O-methyl adenosine
ggctgtgctgaccatcgacagttttagagctagaaatagcaagttaaaataaggctagtccgttatcaacttgaaaaagtggcaccgagtcggtgcagtccctttctcgtcgatggtca

SEQ ID NO: 24208 - RNA, 118 nt, synthetic construct
  source 1..118: mol_type = other RNA
  modified_base 1: mod_base = OTHER; note = 2'O-methyl guanosine phosphorothioate
  modified_base 2: mod_base = OTHER; note = 2'O-methyl guanosine phosphorothioate
  modified_base 3: mod_base = OTHER; note = 2'O-methyl cytidine phosphorothioate
  modified_base 115: mod_base = OTHER; note = guanosine phosphorothioate
  modified_base 116: mod_base = OTHER; note = 2'O-methyl guanosine phosphorothioate
  modified_base 117: mod_base = OTHER; note = 2'O-methyl uridine phosphorothioate
  modified_base 118: mod_base = OTHER; note = 2'O-methyl cytidine
ggctgtgctgaccatcgacagttttagagctagaaatagcaagttaaaataaggctagtccgttatcaacttgaaaaagtggcaccgagtcggtgcagtccctttctcgtcgatggtc

SEQ ID NO: 24209 - RNA, 125 nt, synthetic construct
  source 1..125: mol_type = other RNA
  modified_base 1: mod_base = OTHER; note = 2'O-methyl guanosine phosphorothioate
  modified_base 2: mod_base = OTHER; note = 2'O-methyl guanosine phosphorothioate
  modified_base 3: mod_base = OTHER; note = 2'O-methyl cytidine phosphorothioate
  modified_base 122: mod_base = OTHER; note = adenosine phosphorothioate
  modified_base 123: mod_base = OTHER; note = 2'O-methyl guanosine phosphorothioate
  modified_base 124: mod_base = OTHER; note = 2'O-methyl cytidine phosphorothioate
  modified_base 125: mod_base = OTHER; note = 2'O-methyl cytidine
ggctgtgctgaccatcgacagttttagagctagaaatagcaagttaaaataaggctagtccgttatcaacttgaaaaagtggcaccgagtcggtgctccctttctcgtcgatggtcagcacagcc

SEQ ID NO: 24210 - RNA, 124 nt, synthetic construct
  source 1..124: mol_type = other RNA
  modified_base 1: mod_base = OTHER; note = 2'O-methyl guanosine phosphorothioate
  modified_base 2: mod_base = OTHER; note = 2'O-methyl guanosine phosphorothioate
  modified_base 3: mod_base = OTHER; note = 2'O-methyl cytidine phosphorothioate
  modified_base 121: mod_base = OTHER; note = cytidine phosphorothioate
  modified_base 122: mod_base = OTHER; note = 2'O-methyl adenosine phosphorothioate
  modified_base 123: mod_base = OTHER; note = 2'O-methyl guanosine phosphorothioate
  modified_base 124: mod_base = OTHER; note = 2'O-methyl cytidine
ggctgtgctgaccatcgacagttttagagctagaaatagcaagttaaaataaggctagtccgttatcaacttgaaaaagtggcaccgagtcggtgctccctttctcgtcgatggtcagcacagc

SEQ ID NO: 24211 - RNA, 123 nt, synthetic construct
  source 1..123: mol_type = other RNA
  modified_base 1: mod_base = OTHER; note = 2'O-methyl guanosine phosphorothioate
  modified_base 2: mod_base = OTHER; note = 2'O-methyl guanosine phosphorothioate
  modified_base 3: mod_base = OTHER; note = 2'O-methyl cytidine phosphorothioate
  modified_base 120: mod_base = OTHER; note = adenosine phosphorothioate
  modified_base 121: mod_base = OTHER; note = 2'O-methyl cytidine phosphorothioate
  modified_base 122: mod_base = OTHER; note = 2'O-methyl adenosine phosphorothioate
  modified_base 123: mod_base = OTHER; note = 2'O-methyl guanosine
ggctgtgctgaccatcgacagttttagagctagaaatagcaagttaaaataaggctagtccgttatcaacttgaaaaagtggcaccgagtcggtgctccctttctcgtcgatggtcagcacag

SEQ ID NO: 24212 - RNA, 122 nt, synthetic construct
  source 1..122: mol_type = other RNA
  modified_base 1: mod_base = OTHER; note = 2'O-methyl guanosine phosphorothioate
  modified_base 2: mod_base = OTHER; note = 2'O-methyl guanosine phosphorothioate
  modified_base 3: mod_base = OTHER; note = 2'O-methyl cytidine phosphorothioate
  modified_base 119: mod_base = OTHER; note = cytidine phosphorothioate
  modified_base 120: mod_base = OTHER; note = 2'O-methyl adenosine phosphorothioate
  modified_base 121: mod_base = OTHER; note = 2'O-methyl cytidine phosphorothioate
  modified_base 122: mod_base = OTHER; note = 2'O-methyl adenosine
ggctgtgctgaccatcgacagttttagagctagaaatagcaagttaaaataaggctagtccgttatcaacttgaaaaagtggcaccgagtcggtgctccctttctcgtcgatggtcagcaca

SEQ ID NO: 24213 - RNA, 121 nt, synthetic construct
  source 1..121: mol_type = other RNA
  modified_base 1: mod_base = OTHER; note = 2'O-methyl guanosine phosphorothioate
  modified_base 2: mod_base = OTHER; note = 2'O-methyl guanosine phosphorothioate
  modified_base 3: mod_base = OTHER; note = 2'O-methyl cytidine phosphorothioate
  modified_base 118: mod_base = OTHER; note = guanosine phosphorothioate
  modified_base 119: mod_base = OTHER; note = 2'O-methyl cytidine phosphorothioate
  modified_base 120: mod_base = OTHER; note = 2'O-methyl adenosine phosphorothioate
  modified_base 121: mod_base = OTHER; note = 2'O-methyl cytidine
ggctgtgctgaccatcgacagttttagagctagaaatagcaagttaaaataaggctagtccgttatcaacttgaaaaagtggcaccgagtcggtgctccctttctcgtcgatggtcagcac

SEQ ID NO: 24214 - RNA, 120 nt, synthetic construct
  source 1..120: mol_type = other RNA
  modified_base 1: mod_base = OTHER; note = 2'O-methyl guanosine phosphorothioate
  modified_base 2: mod_base = OTHER; note = 2'O-methyl guanosine phosphorothioate
  modified_base 3: mod_base = OTHER; note = 2'O-methyl cytidine phosphorothioate
  modified_base 117: mod_base = OTHER; note = adenosine phosphorothioate
  modified_base 118: mod_base = OTHER; note = 2'O-methyl guanosine phosphorothioate
  modified_base 119: mod_base = OTHER; note = 2'O-methyl cytidine phosphorothioate
  modified_base 120: mod_base = OTHER; note = 2'O-methyl adenosine
ggctgtgctgaccatcgacagttttagagctagaaatagcaagttaaaataaggctagtccgttatcaacttgaaaaagtggcaccgagtcggtgctccctttctcgtcgatggtcagca

SEQ ID NO: 24215 - RNA, 119 nt, synthetic construct
  source 1..119: mol_type = other RNA
  modified_base 1: mod_base = OTHER; note = 2'O-methyl guanosine phosphorothioate
  modified_base 2: mod_base = OTHER; note = 2'O-methyl guanosine phosphorothioate
  modified_base 3: mod_base = OTHER; note = 2'O-methyl cytidine phosphorothioate
  modified_base 116: mod_base = OTHER; note = cytidine phosphorothioate
  modified_base 117: mod_base = OTHER; note = 2'O-methyl adenosine phosphorothioate
  modified_base 118: mod_base = OTHER; note = 2'O-methyl guanosine phosphorothioate
  modified_base 119: mod_base = OTHER; note = 2'O-methyl cytidine
ggctgtgctgaccatcgacagttttagagctagaaatagcaagttaaaataaggctagtccgttatcaacttgaaaaagtggcaccgagtcggtgctccctttctcgtcgatggtcagc

SEQ ID NO: 24216 - RNA, 118 nt, synthetic construct
  source 1..118: mol_type = other RNA
  modified_base 1: mod_base = OTHER; note = 2'O-methyl guanosine phosphorothioate
  modified_base 2: mod_base = OTHER; note = 2'O-methyl guanosine phosphorothioate
  modified_base 3: mod_base = OTHER; note = 2'O-methyl cytidine phosphorothioate
  modified_base 115: mod_base = OTHER; note = uridine phosphorothioate
  modified_base 116: mod_base = OTHER; note = 2'O-methyl cytidine phosphorothioate
  modified_base 117: mod_base = OTHER; note = 2'O-methyl adenosine phosphorothioate
  modified_base 118: mod_base = OTHER; note = 2'O-methyl guanosine
ggctgtgctgaccatcgacagttttagagctagaaatagcaagttaaaataaggctagtccgttatcaacttgaaaaagtggcaccgagtcggtgctccctttctcgtcgatggtcag

SEQ ID NO: 24217 - RNA, 117 nt, synthetic construct
  source 1..117: mol_type = other RNA
  modified_base 1: mod_base = OTHER; note = 2'O-methyl guanosine phosphorothioate
  modified_base 2: mod_base = OTHER; note = 2'O-methyl guanosine phosphorothioate
  modified_base 3: mod_base = OTHER; note = 2'O-methyl cytidine phosphorothioate
  modified_base 114: mod_base = OTHER; note = guanosine phosphorothioate
  modified_base 115: mod_base = OTHER; note = 2'O-methyl uridine phosphorothioate
  modified_base 116: mod_base = OTHER; note = 2'O-methyl cytidine phosphorothioate
  modified_base 117: mod_base = OTHER; note = 2'O-methyl adenosine
ggctgtgctgaccatcgacagttttagagctagaaatagcaagttaaaataaggctagtccgttatcaacttgaaaaagtggcaccgagtcggtgctccctttctcgtcgatggtca

SEQ ID NO: 24218 - RNA, 116 nt, synthetic construct
  source 1..116: mol_type = other RNA
  modified_base 1: mod_base = OTHER; note = 2'O-methyl guanosine phosphorothioate
  modified_base 2: mod_base = OTHER; note = 2'O-methyl guanosine phosphorothioate
  modified_base 3: mod_base = OTHER; note = 2'O-methyl cytidine phosphorothioate
  modified_base 113: mod_base = OTHER; note = guanosine phosphorothioate
  modified_base 114: mod_base = OTHER; note = 2'O-methyl guanosine phosphorothioate
  modified_base 115: mod_base = OTHER; note = 2'O-methyl uridine phosphorothioate
  modified_base 116: mod_base = OTHER; note = 2'O-methyl cytidine
ggctgtgctgaccatcgacagttttagagctagaaatagcaagttaaaataaggctagtccgttatcaacttgaaaaagtggcaccgagtcggtgctccctttctcgtcgatggtc

SEQ ID NO: 24219 - RNA, 123 nt, synthetic construct
  source 1..123: mol_type = other RNA
  modified_base 1: mod_base = OTHER; note = 2'O-methyl guanosine phosphorothioate
  modified_base 2: mod_base = OTHER; note = 2'O-methyl guanosine phosphorothioate
  modified_base 3: mod_base = OTHER; note = 2'O-methyl cytidine phosphorothioate
  modified_base 120: mod_base = OTHER; note = adenosine phosphorothioate
  modified_base 121: mod_base = OTHER; note = 2'O-methyl guanosine phosphorothioate
  modified_base 122: mod_base = OTHER; note = 2'O-methyl cytidine phosphorothioate
  modified_base 123: mod_base = OTHER; note = 2'O-methyl cytidine
ggctgtgctgaccatcgacagttttagagctagaaatagcaagttaaaataaggctagtccgttatcaacttgaaaaagtggcaccgagtcggtgccctttctcgtcgatggtcagcacagcc

SEQ ID NO: 24220 - RNA, 122 nt, synthetic construct
  source 1..122: mol_type = other RNA
  modified_base 1: mod_base = OTHER; note = 2'O-methyl guanosine phosphorothioate
  modified_base 2: mod_base = OTHER; note = 2'O-methyl guanosine phosphorothioate
  modified_base 3: mod_base = OTHER; note = 2'O-methyl cytidine phosphorothioate
  modified_base 119: mod_base = OTHER; note = cytidine phosphorothioate
  modified_base 120: mod_base = OTHER; note = 2'O-methyl adenosine phosphorothioate
  modified_base 121: mod_base = OTHER; note = 2'O-methyl guanosine phosphorothioate
  modified_base 122: mod_base = OTHER; note = 2'O-methyl cytidine
ggctgtgctgaccatcgacagttttagagctagaaatagcaagttaaaataaggctagtccgttatcaacttgaaaaagtggcaccgagtcggtgccctttctcgtcgatggtcagcacagc

SEQ ID NO: 24221 - RNA, 121 nt, synthetic construct
  source 1..121: mol_type = other RNA
  modified_base 1: mod_base = OTHER; note = 2'O-methyl guanosine phosphorothioate
  modified_base 2: mod_base = OTHER; note = 2'O-methyl guanosine phosphorothioate
  modified_base 3: mod_base = OTHER; note = 2'O-methyl cytidine phosphorothioate
  modified_base 118: mod_base = OTHER; note = adenosine phosphorothioate
  modified_base 119: mod_base = OTHER; note = 2'O-methyl cytidine phosphorothioate
  modified_base 120: mod_base = OTHER; note = 2'O-methyl adenosine phosphorothioate
  modified_base 121: mod_base = OTHER; note = 2'O-methyl guanosine
ggctgtgctgaccatcgacagttttagagctagaaatagcaagttaaaataaggctagtccgttatcaacttgaaaaagtggcaccgagtcggtgccctttctcgtcgatggtcagcacag

SEQ ID NO: 24222 - RNA, 120 nt, synthetic construct
  source 1..120: mol_type = other RNA
  modified_base 1: mod_base = OTHER; note = 2'O-methyl guanosine phosphorothioate
  modified_base 2: mod_base = OTHER; note = 2'O-methyl guanosine phosphorothioate
  modified_base 3: mod_base = OTHER; note = 2'O-methyl cytidine phosphorothioate
  modified_base 117: mod_base = OTHER; note = cytidine phosphorothioate
  modified_base 118: mod_base = OTHER; note = 2'O-methyl adenosine phosphorothioate
  modified_base 119: mod_base = OTHER; note = 2'O-methyl cytidine phosphorothioate
  modified_base 120: mod_base = OTHER; note = 2'O-methyl adenosine
ggctgtgctgaccatcgacagttttagagctagaaatagcaagttaaaataaggctagtccgttatcaacttgaaaaagtggcaccgagtcggtgccctttctcgtcgatggtcagcaca

SEQ ID NO: 24223 - RNA, 119 nt, synthetic construct
  source 1..119: mol_type = other RNA
  modified_base 1: mod_base = OTHER; note = 2'O-methyl guanosine phosphorothioate
  modified_base 2: mod_base = OTHER; note = 2'O-methyl guanosine phosphorothioate
  modified_base 3: mod_base = OTHER; note = 2'O-methyl cytidine phosphorothioate
  modified_base 116: mod_base = OTHER; note = guanosine phosphorothioate
  modified_base 117: mod_base = OTHER; note = 2'O-methyl cytidine phosphorothioate
  modified_base 118: mod_base = OTHER; note = 2'O-methyl adenosine phosphorothioate
  modified_base 119: mod_base = OTHER; note = 2'O-methyl cytidine
ggctgtgctgaccatcgacagttttagagctagaaatagcaagttaaaataaggctagtccgttatcaacttgaaaaagtggcaccgagtcggtgccctttctcgtcgatggtcagcac

SEQ ID NO: 24224 - RNA, 118 nt, synthetic construct
  source 1..118: mol_type = other RNA
  modified_base 1: mod_base = OTHER; note = 2'O-methyl guanosine phosphorothioate
  modified_base 2: mod_base = OTHER; note = 2'O-methyl guanosine phosphorothioate
  modified_base 3: mod_base = OTHER; note = 2'O-methyl cytidine phosphorothioate
  modified_base 115: mod_base = OTHER; note = adenosine phosphorothioate
  modified_base 116: mod_base = OTHER; note = 2'O-methyl guanosine phosphorothioate
  modified_base 117: mod_base = OTHER; note = 2'O-methyl cytidine phosphorothioate
  modified_base 118: mod_base = OTHER; note = 2'O-methyl adenosine
ggctgtgctgaccatcgacagttttagagctagaaatagcaagttaaaataaggctagtccgttatcaacttgaaaaagtggcaccgagtcggtgccctttctcgtcgatggtcagca

SEQ ID NO: 24225 - RNA, 117 nt, synthetic construct
  source 1..117: mol_type = other RNA
  modified_base 1: mod_base = OTHER; note = 2'O-methyl guanosine phosphorothioate
  modified_base 2: mod_base = OTHER; note = 2'O-methyl guanosine phosphorothioate
  modified_base 3: mod_base = OTHER; note = 2'O-methyl cytidine phosphorothioate
  modified_base 114: mod_base = OTHER; note = cytidine phosphorothioate
  modified_base 115: mod_base = OTHER; note = 2'O-methyl adenosine phosphorothioate
  modified_base 116: mod_base = OTHER; note = 2'O-methyl guanosine phosphorothioate
  modified_base 117: mod_base = OTHER; note = 2'O-methyl cytidine
ggctgtgctgaccatcgacagttttagagctagaaatagcaagttaaaataaggctagtccgttatcaacttgaaaaagtggcaccgagtcggtgccctttctcgtcgatggtcagc

SEQ ID NO: 24226 - RNA, 116 nt, synthetic construct
  source 1..116: mol_type = other RNA
  modified_base 1: mod_base = OTHER; note = 2'O-methyl guanosine phosphorothioate
  modified_base 2: mod_base = OTHER; note = 2'O-methyl guanosine phosphorothioate
  modified_base 3: mod_base = OTHER; note = 2'O-methyl cytidine phosphorothioate
  modified_base 113: mod_base = OTHER; note = uridine phosphorothioate
  modified_base 114: mod_base = OTHER; note = 2'O-methyl cytidine phosphorothioate
  modified_base 115: mod_base = OTHER; note = 2'O-methyl adenosine phosphorothioate
  modified_base 116: mod_base = OTHER; note = 2'O-methyl guanosine
ggctgtgctgaccatcgacagttttagagctagaaatagcaagttaaaataaggctagtccgttatcaacttgaaaaagtggcaccgagtcggtgccctttctcgtcgatggtcag

SEQ ID NO: 24227 - RNA, 115 nt, synthetic construct
  source 1..115: mol_type = other RNA
  modified_base 1: mod_base = OTHER; note = 2'O-methyl guanosine phosphorothioate
  modified_base 2: mod_base = OTHER; note = 2'O-methyl guanosine phosphorothioate
  modified_base 3: mod_base = OTHER; note = 2'O-methyl cytidine phosphorothioate
  modified_base 112: mod_base = OTHER; note = guanosine phosphorothioate
  modified_base 113: mod_base = OTHER; note = 2'O-methyl uridine phosphorothioate
  modified_base 114: mod_base = OTHER; note = 2'O-methyl cytidine phosphorothioate
  modified_base 115: mod_base = OTHER; note = 2'O-methyl adenosine
ggctgtgctgaccatcgacagttttagagctagaaatagcaagttaaaataaggctagtccgttatcaacttgaaaaagtggcaccgagtcggtgccctttctcgtcgatggtca

SEQ ID NO: 24228 - RNA, 114 nt, synthetic construct
  source 1..114: mol_type = other RNA
  modified_base 1: mod_base = OTHER; note = 2'O-methyl guanosine phosphorothioate
  modified_base 2: mod_base = OTHER; note = 2'O-methyl guanosine phosphorothioate
  modified_base 3: mod_base = OTHER; note = 2'O-methyl cytidine phosphorothioate
  modified_base 111: mod_base = OTHER; note = guanosine phosphorothioate
  modified_base 112: mod_base = OTHER; note = 2'O-methyl guanosine phosphorothioate
  modified_base 113: mod_base = OTHER; note = 2'O-methyl uridine phosphorothioate
  modified_base 114: mod_base = OTHER; note = 2'O-methyl cytidine
ggctgtgctgaccatcgacagttttagagctagaaatagcaagttaaaataaggctagtccgttatcaacttgaaaaagtggcaccgagtcggtgccctttctcgtcgatggtc

SEQ ID NO: 24229 - RNA, 121 nt, synthetic construct
  source 1..121: mol_type = other RNA
  modified_base 1: mod_base = OTHER; note = 2'O-methyl guanosine phosphorothioate
  modified_base 2: mod_base = OTHER; note = 2'O-methyl guanosine phosphorothioate
  modified_base 3: mod_base = OTHER; note = 2'O-methyl cytidine phosphorothioate
  modified_base 118: mod_base = OTHER; note = adenosine phosphorothioate
  modified_base 119: mod_base = OTHER; note = 2'O-methyl guanosine phosphorothioate
  modified_base 120: mod_base = OTHER; note = 2'O-methyl cytidine phosphorothioate
  modified_base 121: mod_base = OTHER; note = 2'O-methyl cytidine
ggctgtgctgaccatcgacagttttagagctagaaatagcaagttaaaataaggctagtccgttatcaacttgaaaaagtggcaccgagtcggtgctttctcgtcgatggtcagcacagcc

SEQ ID NO: 24230 - RNA, 120 nt, synthetic construct
  source 1..120: mol_type = other RNA
  modified_base 1: mod_base = OTHER; note = 2'O-methyl guanosine phosphorothioate
  modified_base 2: mod_base = OTHER; note = 2'O-methyl guanosine phosphorothioate
  modified_base 3: mod_base = OTHER; note = 2'O-methyl cytidine phosphorothioate
  modified_base 117: mod_base = OTHER; note = cytidine phosphorothioate
  modified_base 118: mod_base = OTHER; note = 2'O-methyl adenosine phosphorothioate
  modified_base 119: mod_base = OTHER; note = 2'O-methyl guanosine phosphorothioate
  modified_base 120: mod_base = OTHER; note = 2'O-methyl cytidine
ggctgtgctgaccatcgacagttttagagctagaaatagcaagttaaaataaggctagtccgttatcaacttgaaaaagtggcaccgagtcggtgctttctcgtcgatggtcagcacagc

SEQ ID NO: 24231 - RNA, 119 nt, synthetic construct
  source 1..119: mol_type = other RNA
  modified_base 1: mod_base = OTHER; note = 2'O-methyl guanosine phosphorothioate
  modified_base 2: mod_base = OTHER; note = 2'O-methyl guanosine phosphorothioate
  modified_base 3: mod_base = OTHER; note = 2'O-methyl cytidine phosphorothioate
  modified_base 116: mod_base = OTHER; note = adenosine phosphorothioate
  modified_base 117: mod_base = OTHER; note = 2'O-methyl cytidine phosphorothioate
  modified_base 118: mod_base = OTHER; note = 2'O-methyl adenosine phosphorothioate
  modified_base 119: mod_base = OTHER; note = 2'O-methyl guanosine
ggctgtgctgaccatcgacagttttagagctagaaatagcaagttaaaataaggctagtccgttatcaacttgaaaaagtggcaccgagtcggtgctttctcgtcgatggtcagcacag

SEQ ID NO: 24232 - RNA, 118 nt, synthetic construct
  source 1..118: mol_type = other RNA
  modified_base 1: mod_base = OTHER; note = 2'O-methyl guanosine phosphorothioate
  modified_base 2: mod_base = OTHER; note = 2'O-methyl guanosine phosphorothioate
  modified_base 3: mod_base = OTHER; note = 2'O-methyl cytidine phosphorothioate
  modified_base 115: mod_base = OTHER; note = cytidine phosphorothioate
  modified_base 116: mod_base = OTHER; note = 2'O-methyl adenosine phosphorothioate
  modified_base 117: mod_base = OTHER; note = 2'O-methyl cytidine phosphorothioate
  modified_base 118: mod_base = OTHER; note = 2'O-methyl adenosine
ggctgtgctgaccatcgacagttttagagctagaaatagcaagttaaaataaggctagtccgttatcaacttgaaaaagtggcaccgagtcggtgctttctcgtcgatggtcagcaca

SEQ ID NO: 24233 - RNA, 117 nt, synthetic construct
  source 1..117: mol_type = other RNA
  modified_base 1: mod_base = OTHER; note = 2'O-methyl guanosine phosphorothioate
  modified_base 2: mod_base = OTHER; note = 2'O-methyl guanosine phosphorothioate
  modified_base 3: mod_base = OTHER; note = 2'O-methyl cytidine phosphorothioate
  modified_base 114: mod_base = OTHER; note = guanosine phosphorothioate
  modified_base 115: mod_base = OTHER; note = 2'O-methyl cytidine phosphorothioate
  modified_base 116: mod_base = OTHER; note = 2'O-methyl adenosine phosphorothioate
  modified_base 117: mod_base = OTHER; note = 2'O-methyl cytidine
ggctgtgctgaccatcgacagttttagagctagaaatagcaagttaaaataaggctagtccgttatcaacttgaaaaagtggcaccgagtcggtgctttctcgtcgatggtcagcac

SEQ ID NO: 24234 - RNA, 116 nt, synthetic construct
  source 1..116: mol_type = other RNA
  modified_base 1: mod_base = OTHER; note = 2'O-methyl guanosine phosphorothioate
  modified_base 2: mod_base = OTHER; note = 2'O-methyl guanosine phosphorothioate
  modified_base 3: mod_base = OTHER; note = 2'O-methyl cytidine phosphorothioate
  modified_base 113: mod_base = OTHER; note = adenosine phosphorothioate
  modified_base 114: mod_base = OTHER; note = 2'O-methyl guanosine phosphorothioate
  modified_base 115: mod_base = OTHER; note = 2'O-methyl cytidine phosphorothioate
  modified_base 116: mod_base = OTHER; note = 2'O-methyl adenosine
ggctgtgctgaccatcgacagttttagagctagaaatagcaagttaaaataaggctagtccgttatcaacttgaaaaagtggcaccgagtcggtgctttctcgtcgatggtcagca

SEQ ID NO: 24235 - RNA, 115 nt, synthetic construct
  source 1..115: mol_type = other RNA
  modified_base 1: mod_base = OTHER; note = 2'O-methyl guanosine phosphorothioate
  modified_base 2: mod_base = OTHER; note = 2'O-methyl guanosine phosphorothioate
  modified_base 3: mod_base = OTHER; note = 2'O-methyl cytidine phosphorothioate
  modified_base 112: mod_base = OTHER; note = cytidine phosphorothioate
  modified_base 113: mod_base = OTHER; note = 2'O-methyl adenosine phosphorothioate
  modified_base 114: mod_base = OTHER; note = 2'O-methyl guanosine phosphorothioate
  modified_base 115: mod_base = OTHER; note = 2'O-methyl cytidine
ggctgtgctgaccatcgacagttttagagctagaaatagcaagttaaaataaggctagtccgttatcaacttgaaaaagtggcaccgagtcggtgctttctcgtcgatggtcagc

SEQ ID NO: 24236 - RNA, 114 nt, synthetic construct
  source 1..114: mol_type = other RNA
  modified_base 1: mod_base = OTHER; note = 2'O-methyl guanosine phosphorothioate
  modified_base 2: mod_base = OTHER; note = 2'O-methyl guanosine phosphorothioate
  modified_base 3: mod_base = OTHER; note = 2'O-methyl cytidine phosphorothioate
  modified_base 111: mod_base = OTHER; note = uridine phosphorothioate
  modified_base 112: mod_base = OTHER; note = 2'O-methyl cytidine phosphorothioate
  modified_base 113: mod_base = OTHER; note = 2'O-methyl adenosine phosphorothioate
  modified_base 114: mod_base = OTHER; note = 2'O-methyl guanosine
ggctgtgctgaccatcgacagttttagagctagaaatagcaagttaaaataaggctagtccgttatcaacttgaaaaagtggcaccgagtcggtgctttctcgtcgatggtcag

SEQ ID NO: 24237 - RNA, 113 nt, synthetic construct
  source 1..113: mol_type = other RNA
  modified_base 1: mod_base = OTHER; note = 2'O-methyl guanosine phosphorothioate
  modified_base 2: mod_base = OTHER; note = 2'O-methyl guanosine phosphorothioate
  modified_base 3: mod_base = OTHER; note = 2'O-methyl cytidine phosphorothioate
  modified_base 110: mod_base = OTHER; note = guanosine phosphorothioate
  modified_base 111: mod_base = OTHER; note = 2'O-methyl uridine phosphorothioate
  modified_base 112: mod_base = OTHER; note = 2'O-methyl cytidine phosphorothioate
  modified_base 113: mod_base = OTHER; note = 2'O-methyl adenosine
ggctgtgctgaccatcgacagttttagagctagaaatagcaagttaaaataaggctagtccgttatcaacttgaaaaagtggcaccgagtcggtgctttctcgtcgatggtca

SEQ ID NO: 24238 - RNA, 112 nt, synthetic construct
  source 1..112: mol_type = other RNA
  modified_base 1: mod_base = OTHER; note = 2'O-methyl guanosine phosphorothioate
  modified_base 2: mod_base = OTHER; note = 2'O-methyl guanosine phosphorothioate
  modified_base 3: mod_base = OTHER; note = 2'O-methyl cytidine phosphorothioate
  modified_base 109: mod_base = OTHER; note = guanosine phosphorothioate
  modified_base 110: mod_base = OTHER; note = 2'O-methyl guanosine phosphorothioate
  modified_base 111: mod_base = OTHER; note = 2'O-methyl uridine phosphorothioate
  modified_base 112: mod_base = OTHER; note = 2'O-methyl cytidine
ggctgtgctgaccatcgacagttttagagctagaaatagcaagttaaaataaggctagtccgttatcaacttgaaaaagtggcaccgagtcggtgctttctcgtcgatggtc

SEQ ID NO: 24239 - RNA, 119 nt, synthetic construct
  source 1..119: mol_type = other RNA
  modified_base 1: mod_base = OTHER; note = 2'O-methyl guanosine phosphorothioate
  modified_base 2: mod_base = OTHER; note = 2'O-methyl guanosine phosphorothioate
  modified_base 3: mod_base = OTHER; note = 2'O-methyl cytidine phosphorothioate
  modified_base 116: mod_base = OTHER; note = adenosine phosphorothioate
  modified_base 117: mod_base = OTHER; note = 2'O-methyl guanosine phosphorothioate
  modified_base 118: mod_base = OTHER; note = 2'O-methyl cytidine phosphorothioate
  modified_base 119: mod_base = OTHER; note = 2'O-methyl cytidine
ggctgtgctgaccatcgacagttttagagctagaaatagcaagttaaaataaggctagtccgttatcaacttgaaaaagtggcaccgagtcggtgctctcgtcgatggtcagcacagcc

SEQ ID NO: 24240 - RNA, 118 nt, synthetic construct
  source 1..118: mol_type = other RNA
  modified_base 1: mod_base = OTHER; note = 2'O-methyl guanosine phosphorothioate
  modified_base 2: mod_base = OTHER; note = 2'O-methyl guanosine phosphorothioate
  modified_base 3: mod_base = OTHER; note = 2'O-methyl cytidine phosphorothioate
  modified_base 115: mod_base = OTHER; note = cytidine phosphorothioate
  modified_base 116: mod_base = OTHER; note = 2'O-methyl adenosine phosphorothioate
  modified_base 117: mod_base = OTHER; note = 2'O-methyl guanosine phosphorothioate
  modified_base 118: mod_base = OTHER; note = 2'O-methyl cytidine
ggctgtgctgaccatcgacagttttagagctagaaatagcaagttaaaataaggctagtccgttatcaacttgaaaaagtggcaccgagtcggtgctctcgtcgatggtcagcacagc

SEQ ID NO: 24241 - RNA, 117 nt, synthetic construct
  source 1..117: mol_type = other RNA
  modified_base 1: mod_base = OTHER; note = 2'O-methyl guanosine phosphorothioate
  modified_base 2: mod_base = OTHER; note = 2'O-methyl guanosine phosphorothioate
  modified_base 3: mod_base = OTHER; note = 2'O-methyl cytidine phosphorothioate
  modified_base 114: mod_base = OTHER; note = adenosine phosphorothioate
  modified_base 115: mod_base = OTHER; note = 2'O-methyl cytidine phosphorothioate
  modified_base 116: mod_base = OTHER; note = 2'O-methyl adenosine phosphorothioate
  modified_base 117: mod_base = OTHER; note = 2'O-methyl guanosine
ggctgtgctgaccatcgacagttttagagctagaaatagcaagttaaaataaggctagtccgttatcaacttgaaaaagtggcaccgagtcggtgctctcgtcgatggtcagcacag

SEQ ID NO: 24242 - RNA, 116 nt, synthetic construct
  source 1..116: mol_type = other RNA
  modified_base 1: mod_base = OTHER; note = 2'O-methyl guanosine phosphorothioate
  modified_base 2: mod_base = OTHER; note = 2'O-methyl guanosine phosphorothioate
  modified_base 3: mod_base = OTHER; note = 2'O-methyl cytidine phosphorothioate
  modified_base 113: mod_base = OTHER; note = cytidine phosphorothioate
  modified_base 114: mod_base = OTHER; note = 2'O-methyl adenosine phosphorothioate
  modified_base 115: mod_base = OTHER; note = 2'O-methyl cytidine phosphorothioate
  modified_base 116: mod_base = OTHER; note = 2'O-methyl adenosine
ggctgtgctgaccatcgacagttttagagctagaaatagcaagttaaaataaggctagtccgttatcaacttgaaaaagtggcaccgagtcggtgctctcgtcgatggtcagcaca

SEQ ID NO: 24243 - RNA, 115 nt, synthetic construct
  source 1..115: mol_type = other RNA
  modified_base 1: mod_base = OTHER; note = 2'O-methyl guanosine phosphorothioate
  modified_base 2: mod_base = OTHER; note = 2'O-methyl guanosine phosphorothioate
  modified_base 3: mod_base = OTHER; note = 2'O-methyl cytidine phosphorothioate
  modified_base 112: mod_base = OTHER; note = guanosine phosphorothioate
  modified_base 113: mod_base = OTHER; note = 2'O-methyl cytidine phosphorothioate
  modified_base 114: mod_base = OTHER; note = 2'O-methyl adenosine phosphorothioate
  modified_base 115: mod_base = OTHER; note = 2'O-methyl cytidine
ggctgtgctgaccatcgacagttttagagctagaaatagcaagttaaaataaggctagtccgttatcaacttgaaaaagtggcaccgagtcggtgctctcgtcgatggtcagcac

SEQ ID NO: 24244 - RNA, 114 nt, synthetic construct
  source 1..114: mol_type = other RNA
  modified_base 1: mod_base = OTHER; note = 2'O-methyl guanosine phosphorothioate
  modified_base 2: mod_base = OTHER; note = 2'O-methyl guanosine phosphorothioate
  modified_base 3: mod_base = OTHER; note = 2'O-methyl cytidine phosphorothioate
  modified_base 111: mod_base = OTHER; note = adenosine phosphorothioate
  modified_base 112: mod_base = OTHER; note = 2'O-methyl guanosine phosphorothioate
  modified_base 113: mod_base = OTHER; note = 2'O-methyl cytidine phosphorothioate
  modified_base 114: mod_base = OTHER; note = 2'O-methyl adenosine
ggctgtgctgaccatcgacagttttagagctagaaatagcaagttaaaataaggctagtccgttatcaacttgaaaaagtggcaccgagtcggtgctctcgtcgatggtcagca

SEQ ID NO: 24245 - RNA, 113 nt, synthetic construct
  source 1..113: mol_type = other RNA
  modified_base 1: mod_base = OTHER; note = 2'O-methyl guanosine phosphorothioate
  modified_base 2: mod_base = OTHER; note = 2'O-methyl guanosine phosphorothioate
  modified_base 3: mod_base = OTHER; note = 2'O-methyl cytidine phosphorothioate
  modified_base 110: mod_base = OTHER; note = cytidine phosphorothioate
  modified_base 111: mod_base = OTHER; note = 2'O-methyl adenosine phosphorothioate
  modified_base 112: mod_base = OTHER; note = 2'O-methyl guanosine phosphorothioate
  modified_base 113: mod_base = OTHER; note = 2'O-methyl cytidine
ggctgtgctgaccatcgacagttttagagctagaaatagcaagttaaaataaggctagtccgttatcaacttgaaaaagtggcaccgagtcggtgctctcgtcgatggtcagc

SEQ ID NO: 24246 - RNA, 112 nt, synthetic construct
  source 1..112: mol_type = other RNA
  modified_base 1: mod_base = OTHER; note = 2'O-methyl guanosine phosphorothioate
  modified_base 2: mod_base = OTHER; note = 2'O-methyl guanosine phosphorothioate
  modified_base 3: mod_base = OTHER; note = 2'O-methyl cytidine phosphorothioate
  modified_base 109: mod_base = OTHER; note = uridine phosphorothioate
  modified_base 110: mod_base = OTHER; note = 2'O-methyl cytidine phosphorothioate
  modified_base 111: mod_base = OTHER; note = 2'O-methyl adenosine phosphorothioate
  modified_base 112: mod_base = OTHER; note = 2'O-methyl guanosine
ggctgtgctgaccatcgacagttttagagctagaaatagcaagttaaaataaggctagtccgttatcaacttgaaaaagtggcaccgagtcggtgctctcgtcgatggtcag

SEQ ID NO: 24247 - RNA, 111 nt, synthetic construct
  source 1..111: mol_type = other RNA
  modified_base 1: mod_base = OTHER; note = 2'O-methyl guanosine phosphorothioate
  modified_base 2: mod_base = OTHER; note = 2'O-methyl guanosine phosphorothioate
  modified_base 3: mod_base = OTHER; note = 2'O-methyl cytidine phosphorothioate
  modified_base 108: mod_base = OTHER; note = guanosine phosphorothioate
  modified_base 109: mod_base = OTHER; note = 2'O-methyl uridine phosphorothioate
  modified_base 110: mod_base = OTHER; note = 2'O-methyl cytidine phosphorothioate
  modified_base 111: mod_base = OTHER; note = 2'O-methyl adenosine
ggctgtgctgaccatcgacagttttagagctagaaatagcaagttaaaataaggctagtccgttatcaacttgaaaaagtggcaccgagtcggtgctctcgtcgatggtca

SEQ ID NO: 24248 - RNA, 110 nt, synthetic construct
  source 1..110: mol_type = other RNA
  modified_base 1: mod_base = OTHER; note = 2'O-methyl guanosine phosphorothioate
  modified_base 2: mod_base = OTHER; note = 2'O-methyl guanosine phosphorothioate
  modified_base 3: mod_base = OTHER; note = 2'O-methyl cytidine phosphorothioate
  modified_base 107: mod_base = OTHER; note = guanosine phosphorothioate
  modified_base 108: mod_base = OTHER; note = 2'O-methyl guanosine phosphorothioate
  modified_base 109: mod_base = OTHER; note = 2'O-methyl uridine phosphorothioate
  modified_base 110: mod_base = OTHER; note = 2'O-methyl cytidine
ggctgtgctgaccatcgacagttttagagctagaaatagcaagttaaaataaggctagtccgttatcaacttgaaaaagtggcaccgagtcggtgctctcgtcgatggtc

SEQ ID NO: 24249 - RNA, 147 nt, synthetic construct
  source 1..147: mol_type = other RNA
  modified_base 1: mod_base = OTHER; note = 2'O-methyl adenosine phosphorothioate
  modified_base 2: mod_base = OTHER; note = 2'O-methyl guanosine phosphorothioate
  modified_base 3: mod_base = OTHER; note = 2'O-methyl guanosine phosphorothioate
  modified_base 144: mod_base = OTHER; note = guanosine phosphorothioate
  modified_base 145: mod_base = OTHER; note = 2'O-methyl cytidine phosphorothioate
  modified_base 146: mod_base = OTHER; note = 2'O-methyl cytidine phosphorothioate
  modified_base 147: mod_base = OTHER; note = 2'O-methyl uridine
aggctgtgctgaccatcgacgttttagagctagaaatagcaagttaaaataaggctagtccgttatcaacttgaaaaagtggcaccgagtcggtgcacatggccccagcagcttcagtccctttctcgtcgatggtcagcacagcct

SEQ ID NO: 24250 - RNA, 146 nt, synthetic construct
  source 1..146: mol_type = other RNA
  modified_base 1: mod_base = OTHER; note = 2'O-methyl adenosine phosphorothioate
  modified_base 2: mod_base = OTHER; note = 2'O-methyl guanosine phosphorothioate
  modified_base 3: mod_base = OTHER; note = 2'O-methyl guanosine phosphorothioate
  modified_base 143: mod_base = OTHER; note = adenosine phosphorothioate
  modified_base 144: mod_base = OTHER; note = 2'O-methyl guanosine phosphorothioate
  modified_base 145: mod_base = OTHER; note = 2'O-methyl cytidine phosphorothioate
  modified_base 146: mod_base = OTHER; note = 2'O-methyl cytidine
aggctgtgctgaccatcgacgttttagagctagaaatagcaagttaaaataaggctagtccgttatcaacttgaaaaagtggcaccgagtcggtgcacatggccccagcagcttcagtccctttctcgtcgatggtcagcacagcc

SEQ ID NO: 24251 - RNA, 145 nt, synthetic construct
  source 1..145: mol_type = other RNA
  modified_base 1: mod_base = OTHER; note = 2'O-methyl adenosine phosphorothioate
  modified_base 2: mod_base = OTHER; note = 2'O-methyl guanosine phosphorothioate
  modified_base 3: mod_base = OTHER; note = 2'O-methyl guanosine phosphorothioate
  modified_base 142: mod_base = OTHER; note = cytidine phosphorothioate
  modified_base 143: mod_base = OTHER; note = 2'O-methyl adenosine phosphorothioate
  modified_base 144: mod_base = OTHER; note = 2'O-methyl guanosine phosphorothioate
  modified_base 145: mod_base = OTHER; note = 2'O-methyl cytidine
aggctgtgctgaccatcgacgttttagagctagaaatagcaagttaaaataaggctagtccgttatcaacttgaaaaagtggcaccgagtcggtgcacatggccccagcagcttcagtccctttctcgtcgatggtcagcacagc

SEQ ID NO: 24252 - RNA, 144 nt, synthetic construct
  source 1..144: mol_type = other RNA
  modified_base 1: mod_base = OTHER; note = 2'O-methyl adenosine phosphorothioate
  modified_base 2: mod_base = OTHER; note = 2'O-methyl guanosine phosphorothioate
  modified_base 3: mod_base = OTHER; note = 2'O-methyl guanosine phosphorothioate
  modified_base 141: mod_base = OTHER; note = adenosine phosphorothioate
  modified_base 142: mod_base = OTHER; note = 2'O-methyl cytidine phosphorothioate
  modified_base 143: mod_base = OTHER; note = 2'O-methyl adenosine phosphorothioate
  modified_base 144: mod_base = OTHER; note = 2'O-methyl guanosine
aggctgtgctgaccatcgacgttttagagctagaaatagcaagttaaaataaggctagtccgttatcaacttgaaaaagtggcaccgagtcggtgcacatggccccagcagcttcagtccctttctcgtcgatggtcagcacag

SEQ ID NO: 24253 - RNA, 143 nt, synthetic construct
  source 1..143: mol_type = other RNA
  modified_base 1: mod_base = OTHER; note = 2'O-methyl adenosine phosphorothioate
  modified_base 2: mod_base = OTHER; note = 2'O-methyl guanosine phosphorothioate
  modified_base 3: mod_base = OTHER; note = 2'O-methyl guanosine phosphorothioate
  modified_base 140: mod_base = OTHER; note = cytidine phosphorothioate
  modified_base 141: mod_base = OTHER; note = 2'O-methyl adenosine phosphorothioate
  modified_base 142: mod_base = OTHER; note = 2'O-methyl cytidine phosphorothioate
  modified_base 143: mod_base = OTHER; note = 2'O-methyl adenosine
aggctgtgctgaccatcgacgttttagagctagaaatagcaagttaaaataaggctagtccgttatcaacttgaaaaagtggcaccgagtcggtgcacatggccccagcagcttcagtccctttctcgtcgatggtcagcaca

SEQ ID NO: 24254 - RNA, 142 nt, synthetic construct
  source 1..142: mol_type = other RNA
  modified_base 1: mod_base = OTHER; note = 2'O-methyl adenosine phosphorothioate
  modified_base 2: mod_base = OTHER; note = 2'O-methyl guanosine phosphorothioate
  modified_base 3: mod_base = OTHER; note = 2'O-methyl guanosine phosphorothioate
  modified_base 139: mod_base = OTHER; note = guanosine phosphorothioate
  modified_base 140: mod_base = OTHER; note = 2'O-methyl cytidine phosphorothioate
  modified_base 141: mod_base = OTHER; note = 2'O-methyl adenosine phosphorothioate
  modified_base 142: mod_base = OTHER; note = 2'O-methyl cytidine
aggctgtgctgaccatcgacgttttagagctagaaatagcaagttaaaataaggctagtccgttatcaacttgaaaaagtggcaccgagtcggtgcacatggccccagcagcttcagtccctttctcgtcgatggtcagcac

SEQ ID NO: 24255 - RNA, 141 nt, synthetic construct
  source 1..141: mol_type = other RNA
  modified_base 1: mod_base = OTHER; note = 2'O-methyl adenosine phosphorothioate
  modified_base 2: mod_base = OTHER; note = 2'O-methyl guanosine phosphorothioate
  modified_base 3: mod_base = OTHER; note = 2'O-methyl guanosine phosphorothioate
  modified_base 138: mod_base = OTHER; note = adenosine phosphorothioate
  modified_base 139: mod_base = OTHER; note = 2'O-methyl guanosine phosphorothioate
  modified_base 140: mod_base = OTHER; note = 2'O-methyl cytidine phosphorothioate
  modified_base 141: mod_base = OTHER; note = 2'O-methyl adenosine
aggctgtgctgaccatcgacgttttagagctagaaatagcaagttaaaataaggctagtccgttatcaacttgaaaaagtggcaccgagtcggtgcacatggccccagcagcttcagtccctttctcgtcgatggtcagca

SEQ ID NO: 24256 - RNA, 140 nt, synthetic construct
  source 1..140: mol_type = other RNA
  modified_base 1: mod_base = OTHER; note = 2'O-methyl adenosine phosphorothioate
  modified_base 2: mod_base = OTHER; note = 2'O-methyl guanosine phosphorothioate
  modified_base 3: mod_base = OTHER; note = 2'O-methyl guanosine phosphorothioate
  modified_base 137: mod_base = OTHER; note = cytidine phosphorothioate
  modified_base 138: mod_base = OTHER; note = 2'O-methyl adenosine phosphorothioate
  modified_base 139: mod_base = OTHER; note = 2'O-methyl guanosine phosphorothioate
  modified_base 140: mod_base = OTHER; note = 2'O-methyl cytidine
aggctgtgctgaccatcgacgttttagagctagaaatagcaagttaaaataaggctagtccgttatcaacttgaaaaagtggcaccgagtcggtgcacatggccccagcagcttcagtccctttctcgtcgatggtcagc

SEQ ID NO: 24257 - RNA, 139 nt, synthetic construct
  source 1..139: mol_type = other RNA
  modified_base 1: mod_base = OTHER; note = 2'O-methyl adenosine phosphorothioate
  modified_base 2: mod_base = OTHER; note = 2'O-methyl guanosine phosphorothioate
  modified_base 3: mod_base = OTHER; note = 2'O-methyl guanosine phosphorothioate
  modified_base 136: mod_base = OTHER; note = uridine phosphorothioate
  modified_base 137: mod_base = OTHER; note = 2'O-methyl cytidine phosphorothioate
  modified_base 138: mod_base = OTHER; note = 2'O-methyl adenosine phosphorothioate
  modified_base 139: mod_base = OTHER; note = 2'O-methyl guanosine
aggctgtgctgaccatcgacgttttagagctagaaatagcaagttaaaataaggctagtccgttatcaacttgaaaaagtggcaccgagtcggtgcacatggccccagcagcttcagtccctttctcgtcgatggtcag

SEQ ID NO: 24258 - RNA, 138 nt, synthetic construct
  source 1..138: mol_type = other RNA
  modified_base 1: mod_base = OTHER; note = 2'O-methyl adenosine phosphorothioate
  modified_base 2: mod_base = OTHER; note = 2'O-methyl guanosine phosphorothioate
  modified_base 3: mod_base = OTHER; note = 2'O-methyl guanosine phosphorothioate
  modified_base 135: mod_base = OTHER; note = guanosine phosphorothioate
  modified_base 136: mod_base = OTHER; note = 2'O-methyl uridine phosphorothioate
  modified_base 137: mod_base = OTHER; note = 2'O-methyl cytidine phosphorothioate
  modified_base 138: mod_base = OTHER; note = 2'O-methyl adenosine
aggctgtgctgaccatcgacgttttagagctagaaatagcaagttaaaataaggctagtccgttatcaacttgaaaaagtggcaccgagtcggtgcacatggccccagcagcttcagtccctttctcgtcgatggtca

SEQ ID NO: 24259 - RNA, 142 nt, synthetic construct
  source 1..142: mol_type = other RNA
  modified_base 1: mod_base = OTHER; note = 2'O-methyl adenosine phosphorothioate
  modified_base 2: mod_base = OTHER; note = 2'O-methyl guanosine phosphorothioate
  modified_base 3: mod_base = OTHER; note = 2'O-methyl guanosine phosphorothioate
  modified_base 139: mod_base = OTHER; note = guanosine phosphorothioate
  modified_base 140: mod_base = OTHER; note = 2'O-methyl cytidine phosphorothioate
  modified_base 141: mod_base = OTHER; note = 2'O-methyl cytidine phosphorothioate
  modified_base 142: mod_base = OTHER; note = 2'O-methyl uridine
aggctgtgctgaccatcgacgttttagagctagaaatagcaagttaaaataaggctagtccgttatcaacttgaaaaagtggcaccgagtcggtgcgccccagcagcttcagtccctttctcgtcgatggtcagcacagcct

SEQ ID NO: 24260 - RNA, 141 nt, synthetic construct
  source 1..141: mol_type = other RNA
  modified_base 1: mod_base = OTHER; note = 2'O-methyl adenosine phosphorothioate
  modified_base 2: mod_base = OTHER; note = 2'O-methyl guanosine phosphorothioate
  modified_base 3: mod_base = OTHER; note = 2'O-methyl guanosine phosphorothioate
  modified_base 138: mod_base = OTHER; note = adenosine phosphorothioate
  modified_base 139: mod_base = OTHER; note = 2'O-methyl guanosine phosphorothioate
  modified_base 140: mod_base = OTHER; note = 2'O-methyl cytidine phosphorothioate
  modified_base 141: mod_base = OTHER; note = 2'O-methyl cytidine
aggctgtgctgaccatcgacgttttagagctagaaatagcaagttaaaataaggctagtccgttatcaacttgaaaaagtggcaccgagtcggtgcgccccagcagcttcagtccctttctcgtcgatggtcagcacagcc

SEQ ID NO: 24261 - RNA, 140 nt, synthetic construct
  source 1..140: mol_type = other RNA
  modified_base 1: mod_base = OTHER; note = 2'O-methyl adenosine phosphorothioate
  modified_base 2: mod_base = OTHER; note = 2'O-methyl guanosine phosphorothioate
  modified_base 3: mod_base = OTHER; note = 2'O-methyl guanosine phosphorothioate
  modified_base 137: mod_base = OTHER; note = cytidine phosphorothioate
  modified_base 138: mod_base = OTHER; note = 2'O-methyl adenosine phosphorothioate
  modified_base 139: mod_base = OTHER; note = 2'O-methyl guanosine phosphorothioate
  modified_base 140: mod_base = OTHER; note = 2'O-methyl cytidine
aggctgtgctgaccatcgacgttttagagctagaaatagcaagttaaaataaggctagtccgttatcaacttgaaaaagtggcaccgagtcggtgcgccccagcagcttcagtccctttctcgtcgatggtcagcacagc

SEQ ID NO: 24262 - RNA, 139 nt, synthetic construct
  source 1..139: mol_type = other RNA
  modified_base 1: mod_base = OTHER; note = 2'O-methyl adenosine phosphorothioate
  modified_base 2: mod_base = OTHER; note = 2'O-methyl guanosine phosphorothioate
  modified_base 3: mod_base = OTHER; note = 2'O-methyl guanosine phosphorothioate
  modified_base 136: mod_base = OTHER; note = adenosine phosphorothioate
  modified_base 137: mod_base = OTHER; note = 2'O-methyl cytidine phosphorothioate
  modified_base 138: mod_base = OTHER; note = 2'O-methyl adenosine phosphorothioate
  modified_base 139: mod_base = OTHER; note = 2'O-methyl guanosine
aggctgtgctgaccatcgacgttttagagctagaaatagcaagttaaaataaggctagtccgttatcaacttgaaaaagtggcaccgagtcggtgcgccccagcagcttcagtccctttctcgtcgatggtcagcacag

SEQ ID NO: 24263 - RNA, 138 nt, synthetic construct
  source 1..138: mol_type = other RNA
  modified_base 1: mod_base = OTHER; note = 2'O-methyl adenosine phosphorothioate
  modified_base 2: mod_base = OTHER; note = 2'O-methyl guanosine phosphorothioate
  modified_base 3: mod_base = OTHER; note = 2'O-methyl guanosine phosphorothioate
  modified_base 135: mod_base = OTHER; note = cytidine phosphorothioate
  modified_base 136: mod_base = OTHER; note = 2'O-methyl adenosine phosphorothioate
  modified_base 137: mod_base = OTHER; note = 2'O-methyl cytidine phosphorothioate
  modified_base 138: mod_base = OTHER; note = 2'O-methyl adenosine
aggctgtgctgaccatcgacgttttagagctagaaatagcaagttaaaataaggctagtccgttatcaacttgaaaaagtggcaccgagtcggtgcgccccagcagcttcagtccctttctcgtcgatggtcagcaca

SEQ ID NO: 24264 - RNA, 137 nt, synthetic construct
  source 1..137: mol_type = other RNA
  modified_base 1: mod_base = OTHER; note = 2'O-methyl adenosine phosphorothioate
  modified_base 2: mod_base = OTHER; note = 2'O-methyl guanosine phosphorothioate
  modified_base 3: mod_base = OTHER; note = 2'O-methyl guanosine phosphorothioate
  modified_base 134: mod_base = OTHER; note = guanosine phosphorothioate
  modified_base 135: mod_base = OTHER; note = 2'O-methyl cytidine phosphorothioate
  modified_base 136: mod_base = OTHER; note = 2'O-methyl adenosine phosphorothioate
  modified_base 137: mod_base = OTHER; note = 2'O-methyl cytidine
aggctgtgctgaccatcgacgttttagagctagaaatagcaagttaaaataaggctagtccgttatcaacttgaaaaagtggcaccgagtcggtgcgccccagcagcttcagtccctttctcgtcgatggtcagcac

SEQ ID NO: 24265 - RNA, 136 nt, synthetic construct
  source 1..136: mol_type = other RNA
  modified_base 1: mod_base = OTHER; note = 2'O-methyl adenosine phosphorothioate
  modified_base 2: mod_base = OTHER; note = 2'O-methyl guanosine phosphorothioate
  modified_base 3: mod_base = OTHER; note = 2'O-methyl guanosine phosphorothioate
  modified_base 133: mod_base = OTHER; note = adenosine phosphorothioate
  modified_base 134: mod_base = OTHER; note = 2'O-methyl guanosine phosphorothioate
  modified_base 135: mod_base = OTHER; note = 2'O-methyl cytidine phosphorothioate
  modified_base 136: mod_base = OTHER; note = 2'O-methyl adenosine
aggctgtgctgaccatcgacgttttagagctagaaatagcaagttaaaataaggctagtccgttatcaacttgaaaaagtggcaccgagtcggtgcgccccagcagcttcagtccctttctcgtcgatggtcagca

SEQ ID NO: 24266 - RNA, 135 nt, synthetic construct
  source 1..135: mol_type = other RNA
  modified_base 1: mod_base = OTHER; note = 2'O-methyl adenosine phosphorothioate
  modified_base 2: mod_base = OTHER; note = 2'O-methyl guanosine phosphorothioate
  modified_base 3: mod_base = OTHER; note = 2'O-methyl guanosine phosphorothioate
  modified_base 132: mod_base = OTHER; note = cytidine phosphorothioate
  modified_base 133: mod_base = OTHER; note = 2'O-methyl adenosine phosphorothioate
  modified_base 134: mod_base = OTHER; note = 2'O-methyl guanosine phosphorothioate
  modified_base 135: mod_base = OTHER; note = 2'O-methyl cytidine
aggctgtgctgaccatcgacgttttagagctagaaatagcaagttaaaataaggctagtccgttatcaacttgaaaaagtggcaccgagtcggtgcgccccagcagcttcagtccctttctcgtcgatggtcagc

SEQ ID NO: 24267 - RNA, 134 nt, synthetic construct
  source 1..134: mol_type = other RNA
  modified_base 1: mod_base = OTHER; note = 2'O-methyl adenosine phosphorothioate
  modified_base 2: mod_base = OTHER; note = 2'O-methyl guanosine phosphorothioate
  modified_base 3: mod_base = OTHER; note = 2'O-methyl guanosine phosphorothioate
  modified_base 131: mod_base = OTHER; note = uridine phosphorothioate
  modified_base 132: mod_base = OTHER; note = 2'O-methyl cytidine phosphorothioate
  modified_base 133: mod_base = OTHER; note = 2'O-methyl adenosine phosphorothioate
  modified_base 134: mod_base = OTHER; note = 2'O-methyl guanosine
aggctgtgctgaccatcgacgttttagagctagaaatagcaagttaaaataaggctagtccgttatcaacttgaaaaagtggcaccgagtcggtgcgccccagcagcttcagtccctttctcgtcgatggtcag

SEQ ID NO: 24268 - RNA, 133 nt, synthetic construct
  source 1..133: mol_type = other RNA
  modified_base 1: mod_base = OTHER; note = 2'O-methyl adenosine phosphorothioate
  modified_base 2: mod_base = OTHER; note = 2'O-methyl guanosine phosphorothioate
  modified_base 3: mod_base = OTHER; note = 2'O-methyl guanosine phosphorothioate
  modified_base 130: mod_base = OTHER; note = guanosine phosphorothioate
  modified_base 131: mod_base = OTHER; note = 2'O-methyl uridine phosphorothioate
  modified_base 132: mod_base = OTHER; note = 2'O-methyl cytidine phosphorothioate
  modified_base 133: mod_base = OTHER; note = 2'O-methyl adenosine
aggctgtgctgaccatcgacgttttagagctagaaatagcaagttaaaataaggctagtccgttatcaacttgaaaaagtggcaccgagtcggtgcgccccagcagcttcagtccctttctcgtcgatggtca

SEQ ID NO: 24269 - RNA, 137 nt, synthetic construct
  source 1..137: mol_type = other RNA
  modified_base 1: mod_base = OTHER; note = 2'O-methyl adenosine phosphorothioate
  modified_base 2: mod_base = OTHER; note = 2'O-methyl guanosine phosphorothioate
  modified_base 3: mod_base = OTHER; note = 2'O-methyl guanosine phosphorothioate
  modified_base 134: mod_base = OTHER; note = guanosine phosphorothioate
  modified_base 135: mod_base = OTHER; note = 2'O-methyl cytidine phosphorothioate
  modified_base 136: mod_base = OTHER; note = 2'O-methyl cytidine phosphorothioate
  modified_base 137: mod_base = OTHER; note = 2'O-methyl uridine
aggctgtgctgaccatcgacgttttagagctagaaatagcaagttaaaataaggctagtccgttatcaacttgaaaaagtggcaccgagtcggtgcagcagcttcagtccctttctcgtcgatggtcagcacagcct

SEQ ID NO: 24270 - RNA, 136 nt, synthetic construct
  source 1..136: mol_type = other RNA
  modified_base 1: mod_base = OTHER; note = 2'O-methyl adenosine phosphorothioate
  modified_base 2: mod_base = OTHER; note = 2'O-methyl guanosine phosphorothioate
  modified_base 3: mod_base = OTHER; note = 2'O-methyl guanosine phosphorothioate
  modified_base 133: mod_base = OTHER; note = adenosine phosphorothioate
  modified_base 134: mod_base = OTHER; note = 2'O-methyl guanosine phosphorothioate
  modified_base 135: mod_base = OTHER; note = 2'O-methyl cytidine phosphorothioate
  modified_base 136: mod_base = OTHER; note = 2'O-methyl cytidine
aggctgtgctgaccatcgacgttttagagctagaaatagcaagttaaaataaggctagtccgttatcaacttgaaaaagtggcaccgagtcggtgcagcagcttcagtccctttctcgtcgatggtcagcacagcc

SEQ ID NO: 24271 - RNA, 135 nt, synthetic construct
  source 1..135: mol_type = other RNA
  modified_base 1: mod_base = OTHER; note = 2'O-methyl adenosine phosphorothioate
  modified_base 2: mod_base = OTHER; note = 2'O-methyl guanosine phosphorothioate
  modified_base 3: mod_base = OTHER; note = 2'O-methyl guanosine phosphorothioate
  modified_base 132: mod_base = OTHER; note = cytidine phosphorothioate
  modified_base 133: mod_base = OTHER; note = 2'O-methyl adenosine phosphorothioate
  modified_base 134: mod_base = OTHER; note = 2'O-methyl guanosine phosphorothioate
  modified_base 135: mod_base = OTHER; note = 2'O-methyl cytidine
aggctgtgctgaccatcgacgttttagagctagaaatagcaagttaaaataaggctagtccgttatcaacttgaaaaagtggcaccgagtcggtgcagcagcttcagtccctttctcgtcgatggtcagcacagc

SEQ ID NO: 24272 - RNA, 134 nt, synthetic construct
  source 1..134: mol_type = other RNA
  modified_base 1: mod_base = OTHER; note = 2'O-methyl adenosine phosphorothioate
  modified_base 2: mod_base = OTHER; note = 2'O-methyl guanosine phosphorothioate
  modified_base 3: mod_base = OTHER; note = 2'O-methyl guanosine phosphorothioate
  modified_base 131: mod_base = OTHER; note = adenosine phosphorothioate
  modified_base 132: mod_base = OTHER; note = 2'O-methyl cytidine phosphorothioate
  modified_base 133: mod_base = OTHER; note = 2'O-methyl adenosine phosphorothioate
  modified_base 134: mod_base = OTHER; note = 2'O-methyl guanosine
aggctgtgctgaccatcgacgttttagagctagaaatagcaagttaaaataaggctagtccgttatcaacttgaaaaagtggcaccgagtcggtgcagcagcttcagtccctttctcgtcgatggtcagcacag

SEQ ID NO: 24273 - RNA, 133 nt, synthetic construct
  source 1..133: mol_type = other RNA
  modified_base 1: mod_base = OTHER; note = 2'O-methyl adenosine phosphorothioate
  modified_base 2: mod_base = OTHER; note = 2'O-methyl guanosine phosphorothioate
  modified_base 3: mod_base = OTHER; note = 2'O-methyl guanosine phosphorothioate
  modified_base 130: mod_base = OTHER; note = cytidine phosphorothioate
  modified_base 131: mod_base = OTHER; note = 2'O-methyl adenosine phosphorothioate
  modified_base 132: mod_base = OTHER; note = 2'O-methyl cytidine phosphorothioate
  modified_base 133: mod_base = OTHER; note = 2'O-methyl adenosine
aggctgtgctgaccatcgacgttttagagctagaaatagcaagttaaaataaggctagtccgttatcaacttgaaaaagtggcaccgagtcggtgcagcagcttcagtccctttctcgtcgatggtcagcaca

SEQ ID NO: 24274 - RNA, 132 nt, synthetic construct
  source 1..132: mol_type = other RNA
  modified_base 1: mod_base = OTHER; note = 2'O-methyl adenosine phosphorothioate
  modified_base 2: mod_base = OTHER; note = 2'O-methyl guanosine phosphorothioate
  modified_base 3: mod_base = OTHER; note = 2'O-methyl guanosine phosphorothioate
  modified_base 129: mod_base = OTHER; note = guanosine phosphorothioate
  modified_base 130: mod_base = OTHER; note = 2'O-methyl cytidine phosphorothioate
  modified_base 131: mod_base = OTHER; note = 2'O-methyl adenosine phosphorothioate
  modified_base 132: mod_base = OTHER; note = 2'O-methyl cytidine
aggctgtgctgaccatcgacgttttagagctagaaatagcaagttaaaataaggctagtccgttatcaacttgaaaaagtggcaccgagtcggtgcagcagcttcagtccctttctcgtcgatggtcagcac

SEQ ID NO: 24275 - RNA, 131 nt, synthetic construct
  source 1..131: mol_type = other RNA
  modified_base 1: mod_base = OTHER; note = 2'O-methyl adenosine phosphorothioate
  modified_base 2: mod_base = OTHER; note = 2'O-methyl guanosine phosphorothioate
  modified_base 3: mod_base = OTHER; note = 2'O-methyl guanosine phosphorothioate
  modified_base 128: mod_base = OTHER; note = adenosine phosphorothioate
  modified_base 129: mod_base = OTHER; note = 2'O-methyl guanosine phosphorothioate
  modified_base 130: mod_base = OTHER; note = 2'O-methyl cytidine phosphorothioate
  modified_base 131: mod_base = OTHER; note = 2'O-methyl adenosine
aggctgtgctgaccatcgacgttttagagctagaaatagcaagttaaaataaggctagtccgttatcaacttgaaaaagtggcaccgagtcggtgcagcagcttcagtccctttctcgtcgatggtcagca

SEQ ID NO: 24276 - RNA, 130 nt, synthetic construct
  source 1..130: mol_type = other RNA
  modified_base 1: mod_base = OTHER; note = 2'O-methyl adenosine phosphorothioate
  modified_base 2: mod_base = OTHER; note = 2'O-methyl guanosine phosphorothioate
  modified_base 3: mod_base = OTHER; note = 2'O-methyl guanosine phosphorothioate
  modified_base 127: mod_base = OTHER; note = cytidine phosphorothioate
  modified_base 128: mod_base = OTHER; note = 2'O-methyl adenosine phosphorothioate
  modified_base 129: mod_base = OTHER; note = 2'O-methyl guanosine phosphorothioate
  modified_base 130: mod_base = OTHER; note = 2'O-methyl cytidine
aggctgtgctgaccatcgacgttttagagctagaaatagcaagttaaaataaggctagtccgttatcaacttgaaaaagtggcaccgagtcggtgcagcagcttcagtccctttctcgtcgatggtcagc

SEQ ID NO: 24277 - RNA, 129 nt, synthetic construct
  source 1..129: mol_type = other RNA
  modified_base 1: mod_base = OTHER; note = 2'O-methyl adenosine phosphorothioate
  modified_base 2: mod_base = OTHER; note = 2'O-methyl guanosine phosphorothioate
  modified_base 3: mod_base = OTHER; note = 2'O-methyl guanosine phosphorothioate
  modified_base 126: mod_base = OTHER; note = uridine phosphorothioate
  modified_base 127: mod_base = OTHER; note = 2'O-methyl cytidine phosphorothioate
  modified_base 128: mod_base = OTHER; note = 2'O-methyl adenosine phosphorothioate
  modified_base 129: mod_base = OTHER; note = 2'O-methyl guanosine
aggctgtgctgaccatcgacgttttagagctagaaatagcaagttaaaataaggctagtccgttatcaacttgaaaaagtggcaccgagtcggtgcagcagcttcagtccctttctcgtcgatggtcag

SEQ ID NO: 24278 - RNA, 128 nt, synthetic construct
  source 1..128: mol_type = other RNA
  modified_base 1: mod_base = OTHER; note = 2'O-methyl adenosine phosphorothioate
  modified_base 2: mod_base = OTHER; note = 2'O-methyl guanosine phosphorothioate
  modified_base 3: mod_base = OTHER; note = 2'O-methyl guanosine phosphorothioate
  modified_base 125: mod_base = OTHER; note = guanosine phosphorothioate
  modified_base 126: mod_base = OTHER; note = 2'O-methyl uridine phosphorothioate
  modified_base 127: mod_base = OTHER; note = 2'O-methyl cytidine phosphorothioate
  modified_base 128: mod_base = OTHER; note = 2'O-methyl adenosine
aggctgtgctgaccatcgacgttttagagctagaaatagcaagttaaaataaggctagtccgttatcaacttgaaaaagtggcaccgagtcggtgcagcagcttcagtccctttctcgtcgatggtca

SEQ ID NO: 24279 - RNA, 131 nt, synthetic construct
  source 1..131: mol_type = other RNA
  modified_base 1: mod_base = OTHER; note = 2'O-methyl adenosine phosphorothioate
  modified_base 2: mod_base = OTHER; note = 2'O-methyl guanosine phosphorothioate
  modified_base 3: mod_base = OTHER; note = 2'O-methyl guanosine phosphorothioate
  modified_base 128: mod_base = OTHER; note = guanosine phosphorothioate
  modified_base 129: mod_base = OTHER; note = 2'O-methyl cytidine phosphorothioate
  modified_base 130: mod_base = OTHER; note = 2'O-methyl cytidine phosphorothioate
  modified_base 131: mod_base = OTHER; note = 2'O-methyl uridine
aggctgtgctgaccatcgacgttttagagctagaaatagcaagttaaaataaggctagtccgttatcaacttgaaaaagtggcaccgagtcggtgcttcagtccctttctcgtcgatggtcagcacagcct

SEQ ID NO: 24280 - RNA, 130 nt, synthetic construct
  source 1..130: mol_type = other RNA
  modified_base 1: mod_base = OTHER; note = 2'O-methyl adenosine phosphorothioate
  modified_base 2: mod_base = OTHER; note = 2'O-methyl guanosine phosphorothioate
  modified_base 3: mod_base = OTHER; note = 2'O-methyl guanosine phosphorothioate
  modified_base 127: mod_base = OTHER; note = adenosine phosphorothioate
  modified_base 128: mod_base = OTHER; note = 2'O-methyl guanosine phosphorothioate
  modified_base 129: mod_base = OTHER; note = 2'O-methyl cytidine phosphorothioate
  modified_base 130: mod_base = OTHER; note = 2'O-methyl cytidine
aggctgtgctgaccatcgacgttttagagctagaaatagcaagttaaaataaggctagtccgttatcaacttgaaaaagtggcaccgagtcggtgcttcagtccctttctcgtcgatggtcagcacagcc

SEQ ID NO: 24281 - RNA, 129 nt, synthetic construct
  source 1..129: mol_type = other RNA
  modified_base 1: mod_base = OTHER; note = 2'O-methyl adenosine phosphorothioate
  modified_base 2: mod_base = OTHER; note = 2'O-methyl guanosine phosphorothioate
  modified_base 3: mod_base = OTHER; note = 2'O-methyl guanosine phosphorothioate
  modified_base 126: mod_base = OTHER; note = cytidine phosphorothioate
  modified_base 127: mod_base = OTHER; note = 2'O-methyl adenosine phosphorothioate
  modified_base 128: mod_base = OTHER; note = 2'O-methyl guanosine phosphorothioate
  modified_base 129: mod_base = OTHER; note = 2'O-methyl cytidine
aggctgtgctgaccatcgacgttttagagctagaaatagcaagttaaaataaggctagtccgttatcaacttgaaaaagtggcaccgagtcggtgcttcagtccctttctcgtcgatggtcagcacagc

SEQ ID NO: 24282 - RNA, 128 nt, synthetic construct
  source 1..128: mol_type = other RNA
  modified_base 1: mod_base = OTHER; note = 2'O-methyl adenosine phosphorothioate
  modified_base 2: mod_base = OTHER; note = 2'O-methyl guanosine phosphorothioate
  modified_base 3: mod_base = OTHER; note = 2'O-methyl guanosine phosphorothioate
  modified_base 125: mod_base = OTHER; note = adenosine phosphorothioate
  modified_base 126: mod_base = OTHER; note = 2'O-methyl cytidine phosphorothioate
  modified_base 127: mod_base = OTHER; note = 2'O-methyl adenosine phosphorothioate
  modified_base 128: mod_base = OTHER; note = 2'O-methyl guanosine
aggctgtgctgaccatcgacgttttagagctagaaatagcaagttaaaataaggctagtccgttatcaacttgaaaaagtggcaccgagtcggtgcttcagtccctttctcgtcgatggtcagcacag

SEQ ID NO: 24283 - RNA, 127 nt, synthetic construct
  source 1..127: mol_type = other RNA
  modified_base 1: mod_base = OTHER; note = 2'O-methyl adenosine phosphorothioate
  modified_base 2: mod_base = OTHER; note = 2'O-methyl guanosine phosphorothioate
  modified_base 3: mod_base = OTHER; note = 2'O-methyl guanosine phosphorothioate
  modified_base 124: mod_base = OTHER; note = cytidine phosphorothioate
  modified_base 125: mod_base = OTHER; note = 2'O-methyl adenosine phosphorothioate
  modified_base 126: mod_base = OTHER; note = 2'O-methyl cytidine phosphorothioate
  modified_base 127: mod_base = OTHER; note = 2'O-methyl adenosine
aggctgtgctgaccatcgacgttttagagctagaaatagcaagttaaaataaggctagtccgttatcaacttgaaaaagtggcaccgagtcggtgcttcagtccctttctcgtcgatggtcagcaca

SEQ ID NO: 24284 - RNA, 126 nt, synthetic construct
  source 1..126: mol_type = other RNA
  modified_base 1: mod_base = OTHER; note = 2'O-methyl adenosine phosphorothioate
  modified_base 2: mod_base = OTHER; note = 2'O-methyl guanosine phosphorothioate
  modified_base 3: mod_base = OTHER; note = 2'O-methyl guanosine phosphorothioate
  modified_base 123: mod_base = OTHER; note = guanosine phosphorothioate
  modified_base 124: mod_base = OTHER; note = 2'O-methyl cytidine phosphorothioate
  modified_base 125: mod_base = OTHER; note = 2'O-methyl adenosine phosphorothioate
  modified_base 126: mod_base = OTHER; note = 2'O-methyl cytidine
aggctgtgctgaccatcgacgttttagagctagaaatagcaagttaaaataaggctagtccgttatcaacttgaaaaagtggcaccgagtcggtgcttcagtccctttctcgtcgatggtcagcac

SEQ ID NO: 24285 - RNA, 125 nt, synthetic construct
  source 1..125: mol_type = other RNA
  modified_base 1: mod_base = OTHER; note = 2'O-methyl adenosine phosphorothioate
  modified_base 2: mod_base = OTHER; note = 2'O-methyl guanosine phosphorothioate
  modified_base 3: mod_base = OTHER; note = 2'O-methyl guanosine phosphorothioate
  modified_base 122: mod_base = OTHER; note = adenosine phosphorothioate
  modified_base 123: mod_base = OTHER; note = 2'O-methyl guanosine phosphorothioate
  modified_base 124: mod_base = OTHER; note = 2'O-methyl cytidine phosphorothioate
  modified_base 125: mod_base = OTHER; note = 2'O-methyl adenosine
aggctgtgctgaccatcgacgttttagagctagaaatagcaagttaaaataaggctagtccgttatcaacttgaaaaagtggcaccgagtcggtgcttcagtccctttctcgtcgatggtcagca

SEQ ID NO: 24286 - RNA, 124 nt, synthetic construct
  source 1..124: mol_type = other RNA
  modified_base 1: mod_base = OTHER; note = 2'O-methyl adenosine phosphorothioate
  modified_base 2: mod_base = OTHER; note = 2'O-methyl guanosine phosphorothioate
  modified_base 3: mod_base = OTHER; note = 2'O-methyl guanosine phosphorothioate
  modified_base 121: mod_base = OTHER; note = cytidine phosphorothioate
  modified_base 122: mod_base = OTHER; note = 2'O-methyl adenosine phosphorothioate
  modified_base 123: mod_base = OTHER; note = 2'O-methyl guanosine phosphorothioate
  modified_base 124: mod_base = OTHER; note = 2'O-methyl cytidine
aggctgtgctgaccatcgacgttttagagctagaaatagcaagttaaaataaggctagtccgttatcaacttgaaaaagtggcaccgagtcggtgcttcagtccctttctcgtcgatggtcagc

SEQ ID NO: 24287 - RNA, 123 nt, synthetic construct
  source 1..123: mol_type = other RNA
  modified_base 1: mod_base = OTHER; note = 2'O-methyl adenosine phosphorothioate
  modified_base 2: mod_base = OTHER; note = 2'O-methyl guanosine phosphorothioate
  modified_base 3: mod_base = OTHER; note = 2'O-methyl guanosine phosphorothioate
  modified_base 120: mod_base = OTHER; note = uridine phosphorothioate
  modified_base 121: mod_base = OTHER; note = 2'O-methyl cytidine phosphorothioate
  modified_base 122: mod_base = OTHER; note = 2'O-methyl adenosine phosphorothioate
  modified_base 123: mod_base = OTHER; note = 2'O-methyl guanosine
aggctgtgctgaccatcgacgttttagagctagaaatagcaagttaaaataaggctagtccgttatcaacttgaaaaagtggcaccgagtcggtgcttcagtccctttctcgtcgatggtcag

SEQ ID NO: 24288 - RNA, 122 nt, synthetic construct
  source 1..122: mol_type = other RNA
  modified_base 1: mod_base = OTHER; note = 2'O-methyl adenosine phosphorothioate
  modified_base 2: mod_base = OTHER; note = 2'O-methyl guanosine phosphorothioate
  modified_base 3: mod_base = OTHER; note = 2'O-methyl guanosine phosphorothioate
  modified_base 119: mod_base = OTHER; note = guanosine phosphorothioate
  modified_base 120: mod_base = OTHER; note = 2'O-methyl uridine phosphorothioate
  modified_base 121: mod_base = OTHER; note = 2'O-methyl cytidine phosphorothioate
  modified_base 122: mod_base = OTHER; note = 2'O-methyl adenosine
aggctgtgctgaccatcgacgttttagagctagaaatagcaagttaaaataaggctagtccgttatcaacttgaaaaagtggcaccgagtcggtgcttcagtccctttctcgtcgatggtca

SEQ ID NO: 24289 - RNA, 128 nt, synthetic construct
  source 1..128: mol_type = other RNA
  modified_base 1: mod_base = OTHER; note = 2'O-methyl adenosine phosphorothioate
  modified_base 2: mod_base = OTHER; note = 2'O-methyl guanosine phosphorothioate
  modified_base 3: mod_base = OTHER; note = 2'O-methyl guanosine phosphorothioate
  modified_base 125: mod_base = OTHER; note = guanosine phosphorothioate
  modified_base 126: mod_base = OTHER; note = 2'O-methyl cytidine phosphorothioate
  modified_base 127: mod_base = OTHER; note = 2'O-methyl cytidine phosphorothioate
  modified_base 128: mod_base = OTHER; note = 2'O-methyl uridine
aggctgtgctgaccatcgacgttttagagctagaaatagcaagttaaaataaggctagtccgttatcaacttgaaaaagtggcaccgagtcggtgcagtccctttctcgtcgatggtcagcacagcct

SEQ ID NO: 24290 - RNA, 127 nt, synthetic construct
  source 1..127: mol_type = other RNA
  modified_base 1: mod_base = OTHER; note = 2'O-methyl adenosine phosphorothioate
  modified_base 2: mod_base = OTHER; note = 2'O-methyl guanosine phosphorothioate
  modified_base 3: mod_base = OTHER; note = 2'O-methyl guanosine phosphorothioate
  modified_base 124: mod_base = OTHER; note = adenosine phosphorothioate
  modified_base 125: mod_base = OTHER; note = 2'O-methyl guanosine phosphorothioate
  modified_base 126: mod_base = OTHER; note = 2'O-methyl cytidine phosphorothioate
  modified_base 127: mod_base = OTHER; note = 2'O-methyl cytidine
aggctgtgctgaccatcgacgttttagagctagaaatagcaagttaaaataaggctagtccgttatcaacttgaaaaagtggcaccgagtcggtgcagtccctttctcgtcgatggtcagcacagcc

SEQ ID NO: 24291 - RNA, 126 nt, synthetic construct
  source 1..126: mol_type = other RNA
  modified_base 1: mod_base = OTHER; note = 2'O-methyl adenosine phosphorothioate
  modified_base 2: mod_base = OTHER; note = 2'O-methyl guanosine phosphorothioate
  modified_base 3: mod_base = OTHER; note = 2'O-methyl guanosine phosphorothioate
  modified_base 123: mod_base = OTHER; note = cytidine phosphorothioate
  modified_base 124: mod_base = OTHER; note = 2'O-methyl adenosine phosphorothioate
  modified_base 125: mod_base = OTHER; note = 2'O-methyl guanosine phosphorothioate
  modified_base 126: mod_base = OTHER; note = 2'O-methyl cytidine
aggctgtgctgaccatcgacgttttagagctagaaatagcaagttaaaataaggctagtccgttatcaacttgaaaaagtggcaccgagtcggtgcagtccctttctcgtcgatggtcagcacagc

SEQ ID NO: 24292 - RNA, 125 nt, synthetic construct
  source 1..125: mol_type = other RNA
  modified_base 1: mod_base = OTHER; note = 2'O-methyl adenosine phosphorothioate
  modified_base 2: mod_base = OTHER; note = 2'O-methyl guanosine phosphorothioate
  modified_base 3: mod_base = OTHER; note = 2'O-methyl guanosine phosphorothioate
  modified_base 122: mod_base = OTHER; note = adenosine phosphorothioate
  modified_base 123: mod_base = OTHER; note = 2'O-methyl cytidine phosphorothioate
  modified_base 124: mod_base = OTHER; note = 2'O-methyl adenosine phosphorothioate
  modified_base 125: mod_base = OTHER; note = 2'O-methyl guanosine
aggctgtgctgaccatcgacgttttagagctagaaatagcaagttaaaataaggctagtccgttatcaacttgaaaaagtggcaccgagtcggtgcagtccctttctcgtcgatggtcagcacag

SEQ ID NO: 24293 - RNA, 124 nt, synthetic construct
  source 1..124: mol_type = other RNA
  modified_base 1: mod_base = OTHER; note = 2'O-methyl adenosine phosphorothioate
  modified_base 2: mod_base = OTHER; note = 2'O-methyl guanosine phosphorothioate
  modified_base 3: mod_base = OTHER; note = 2'O-methyl guanosine phosphorothioate
  modified_base 121: mod_base = OTHER; note = cytidine phosphorothioate
  modified_base 122: mod_base = OTHER; note = 2'O-methyl adenosine phosphorothioate
  modified_base 123: mod_base = OTHER; note = 2'O-methyl cytidine phosphorothioate
  modified_base 124: mod_base = OTHER; note = 2'O-methyl adenosine
aggctgtgctgaccatcgacgttttagagctagaaatagcaagttaaaataaggctagtccgttatcaacttgaaaaagtggcaccgagtcggtgcagtccctttctcgtcgatggtcagcaca

SEQ ID NO: 24294 - RNA, 123 nt, synthetic construct
  source 1..123: mol_type = other RNA
  modified_base 1: mod_base = OTHER; note = 2'O-methyl adenosine phosphorothioate
  modified_base 2: mod_base = OTHER; note = 2'O-methyl guanosine phosphorothioate
  modified_base 3: mod_base = OTHER; note = 2'O-methyl guanosine phosphorothioate
  modified_base 120: mod_base = OTHER; note = guanosine phosphorothioate
  modified_base 121: mod_base = OTHER; note = 2'O-methyl cytidine phosphorothioate
  modified_base 122: mod_base = OTHER; note = 2'O-methyl adenosine phosphorothioate
  modified_base 123: mod_base = OTHER; note = 2'O-methyl cytidine
aggctgtgctgaccatcgacgttttagagctagaaatagcaagttaaaataaggctagtccgttatcaacttgaaaaagtggcaccgagtcggtgcagtccctttctcgtcgatggtcagcac

SEQ ID NO: 24295 - RNA, 122 nt, synthetic construct
  source 1..122: mol_type = other RNA
  modified_base 1: mod_base = OTHER; note = 2'O-methyl adenosine phosphorothioate
  modified_base 2: mod_base = OTHER; note = 2'O-methyl guanosine phosphorothioate
  modified_base 3: mod_base = OTHER; note = 2'O-methyl guanosine phosphorothioate
  modified_base 119: mod_base = OTHER; note = adenosine phosphorothioate
  modified_base 120: mod_base = OTHER; note = 2'O-methyl guanosine phosphorothioate
  modified_base 121: mod_base = OTHER; note = 2'O-methyl cytidine phosphorothioate
  modified_base 122: mod_base = OTHER; note = 2'O-methyl adenosine
aggctgtgctgaccatcgacgttttagagctagaaatagcaagttaaaataaggctagtccgttatcaacttgaaaaagtggcaccgagtcggtgcagtccctttctcgtcgatggtcagca

SEQ ID NO: 24296 - RNA, 121 nt, synthetic construct
  source 1..121: mol_type = other RNA
  modified_base 1: mod_base = OTHER; note = 2'O-methyl adenosine phosphorothioate
  modified_base 2: mod_base = OTHER; note = 2'O-methyl guanosine phosphorothioate
  modified_base 3: mod_base = OTHER; note = 2'O-methyl guanosine phosphorothioate
  modified_base 118: mod_base = OTHER; note = cytidine phosphorothioate
  modified_base 119: mod_base = OTHER; note = 2'O-methyl adenosine phosphorothioate
  modified_base 120: mod_base = OTHER; note = 2'O-methyl guanosine phosphorothioate
  modified_base 121: mod_base = OTHER; note = 2'O-methyl cytidine
aggctgtgctgaccatcgacgttttagagctagaaatagcaagttaaaataaggctagtccgttatcaacttgaaaaagtggcaccgagtcggtgcagtccctttctcgtcgatggtcagc

SEQ ID NO: 24297 - RNA, 120 nt, synthetic construct
  source 1..120: mol_type = other RNA
  modified_base 1: mod_base = OTHER; note = 2'O-methyl adenosine phosphorothioate
  modified_base 2: mod_base = OTHER; note = 2'O-methyl guanosine phosphorothioate
  modified_base 3: mod_base = OTHER; note = 2'O-methyl guanosine phosphorothioate
  modified_base 117: mod_base = OTHER; note = uridine phosphorothioate
  modified_base 118: mod_base = OTHER; note = 2'O-methyl cytidine phosphorothioate
  modified_base 119: mod_base = OTHER; note = 2'O-methyl adenosine phosphorothioate
  modified_base 120: mod_base = OTHER; note = 2'O-methyl guanosine
aggctgtgctgaccatcgacgttttagagctagaaatagcaagttaaaataaggctagtccgttatcaacttgaaaaagtggcaccgagtcggtgcagtccctttctcgtcgatggtcag

SEQ ID NO: 24298 - RNA, 119 nt, synthetic construct
  source 1..119: mol_type = other RNA
  modified_base 1: mod_base = OTHER; note = 2'O-methyl adenosine phosphorothioate
  modified_base 2: mod_base = OTHER; note = 2'O-methyl guanosine phosphorothioate
  modified_base 3: mod_base = OTHER; note = 2'O-methyl guanosine phosphorothioate
  modified_base 116: mod_base = OTHER; note = guanosine phosphorothioate
  modified_base 117: mod_base = OTHER; note = 2'O-methyl uridine phosphorothioate
  modified_base 118: mod_base = OTHER; note = 2'O-methyl cytidine phosphorothioate
  modified_base 119: mod_base = OTHER; note = 2'O-methyl adenosine
aggctgtgctgaccatcgacgttttagagctagaaatagcaagttaaaataaggctagtccgttatcaacttgaaaaagtggcaccgagtcggtgcagtccctttctcgtcgatggtca

SEQ ID NO: 24299 - RNA, 126 nt, synthetic construct
  source 1..126: mol_type = other RNA
  modified_base 1: mod_base = OTHER; note = 2'O-methyl adenosine phosphorothioate
  modified_base 2: mod_base = OTHER; note = 2'O-methyl guanosine phosphorothioate
  modified_base 3: mod_base = OTHER; note = 2'O-methyl guanosine phosphorothioate
  modified_base 123: mod_base = OTHER; note = guanosine phosphorothioate
  modified_base 124: mod_base = OTHER; note = 2'O-methyl cytidine phosphorothioate
  modified_base 125: mod_base = OTHER; note = 2'O-methyl cytidine phosphorothioate
  modified_base 126: mod_base = OTHER; note = 2'O-methyl uridine
aggctgtgctgaccatcgacgttttagagctagaaatagcaagttaaaataaggctagtccgttatcaacttgaaaaagtggcaccgagtcggtgctccctttctcgtcgatggtcagcacagcct

SEQ ID NO: 24300 - RNA, 125 nt, synthetic construct
  source 1..125: mol_type = other RNA
  modified_base 1: mod_base = OTHER; note = 2'O-methyl adenosine phosphorothioate
  modified_base 2: mod_base = OTHER; note = 2'O-methyl guanosine phosphorothioate
  modified_base 3: mod_base = OTHER; note = 2'O-methyl guanosine phosphorothioate
  modified_base 122: mod_base = OTHER; note = adenosine phosphorothioate
  modified_base 123: mod_base = OTHER; note = 2'O-methyl guanosine phosphorothioate
  modified_base 124: mod_base = OTHER; note = 2'O-methyl cytidine phosphorothioate
  modified_base 125: mod_base = OTHER; note = 2'O-methyl cytidine
aggctgtgctgaccatcgacgttttagagctagaaatagcaagttaaaataaggctagtccgttatcaacttgaaaaagtggcaccgagtcggtgctccctttctcgtcgatggtcagcacagcc

SEQ ID NO: 24301 - RNA, 124 nt, synthetic construct
  source 1..124: mol_type = other RNA
  modified_base 1: mod_base = OTHER; note = 2'O-methyl adenosine phosphorothioate
  modified_base 2: mod_base = OTHER; note = 2'O-methyl guanosine phosphorothioate
  modified_base 3: mod_base = OTHER; note = 2'O-methyl guanosine phosphorothioate
  modified_base 121: mod_base = OTHER; note = cytidine phosphorothioate
  modified_base 122: mod_base = OTHER; note = 2'O-methyl adenosine phosphorothioate
  modified_base 123: mod_base = OTHER; note = 2'O-methyl guanosine phosphorothioate
  modified_base 124: mod_base = OTHER; note = 2'O-methyl cytidine
aggctgtgctgaccatcgacgttttagagctagaaatagcaagttaaaataaggctagtccgttatcaacttgaaaaagtggcaccgagtcggtgctccctttctcgtcgatggtcagcacagc

SEQ ID NO: 24302 - RNA, 123 nt, synthetic construct
  source 1..123: mol_type = other RNA
  modified_base 1: mod_base = OTHER; note = 2'O-methyl adenosine phosphorothioate
  modified_base 2: mod_base = OTHER; note = 2'O-methyl guanosine phosphorothioate
  modified_base 3: mod_base = OTHER; note = 2'O-methyl guanosine phosphorothioate
  modified_base 120: mod_base = OTHER; note = adenosine phosphorothioate
  modified_base 121: mod_base = OTHER; note = 2'O-methyl cytidine phosphorothioate
  modified_base 122: mod_base = OTHER; note = 2'O-methyl adenosine phosphorothioate
  modified_base 123: mod_base = OTHER; note = 2'O-methyl guanosine
aggctgtgctgaccatcgacgttttagagctagaaatagcaagttaaaataaggctagtccgttatcaacttgaaaaagtggcaccgagtcggtgctccctttctcgtcgatggtcagcacag

SEQ ID NO: 24303 - RNA, 122 nt, synthetic construct
  source 1..122: mol_type = other RNA
  modified_base 1: mod_base = OTHER; note = 2'O-methyl adenosine phosphorothioate
  modified_base 2: mod_base = OTHER; note = 2'O-methyl guanosine phosphorothioate
  modified_base 3: mod_base = OTHER; note = 2'O-methyl guanosine phosphorothioate
  modified_base 119: mod_base = OTHER; note = cytidine phosphorothioate
  modified_base 120: mod_base = OTHER; note = 2'O-methyl adenosine phosphorothioate
  modified_base 121: mod_base = OTHER; note = 2'O-methyl cytidine phosphorothioate
  modified_base 122: mod_base = OTHER; note = 2'O-methyl adenosine
aggctgtgctgaccatcgacgttttagagctagaaatagcaagttaaaataaggctagtccgttatcaacttgaaaaagtggcaccgagtcggtgctccctttctcgtcgatggtcagcaca

SEQ ID NO: 24304 - RNA, 121 nt, synthetic construct
  source 1..121: mol_type = other RNA
  modified_base 1: mod_base = OTHER; note = 2'O-methyl adenosine phosphorothioate
  modified_base 2: mod_base = OTHER; note = 2'O-methyl guanosine phosphorothioate
  modified_base 3: mod_base = OTHER; note = 2'O-methyl guanosine phosphorothioate
  modified_base 118: mod_base = OTHER; note = guanosine phosphorothioate
  modified_base 119: mod_base = OTHER; note = 2'O-methyl cytidine phosphorothioate
  modified_base 120: mod_base = OTHER; note = 2'O-methyl adenosine phosphorothioate
  modified_base 121: mod_base = OTHER; note = 2'O-methyl cytidine
aggctgtgctgaccatcgacgttttagagctagaaatagcaagttaaaataaggctagtccgttatcaacttgaaaaagtggcaccgagtcggtgctccctttctcgtcgatggtcagcac

SEQ ID NO: 24305 - RNA, 120 nt, synthetic construct
  source 1..120: mol_type = other RNA
  modified_base 1: mod_base = OTHER; note = 2'O-methyl adenosine phosphorothioate
  modified_base 2: mod_base = OTHER; note = 2'O-methyl guanosine phosphorothioate
  modified_base 3: mod_base = OTHER; note = 2'O-methyl guanosine phosphorothioate
  modified_base 117: mod_base = OTHER; note = adenosine phosphorothioate
  modified_base 118: mod_base = OTHER; note = 2'O-methyl guanosine phosphorothioate
  modified_base 119: mod_base = OTHER; note = 2'O-methyl cytidine phosphorothioate
  modified_base 120: mod_base = OTHER; note = 2'O-methyl adenosine
aggctgtgctgaccatcgacgttttagagctagaaatagcaagttaaaataaggctagtccgttatcaacttgaaaaagtggcaccgagtcggtgctccctttctcgtcgatggtcagca

SEQ ID NO: 24306 - RNA, 119 nt, synthetic construct
  source 1..119: mol_type = other RNA
  modified_base 1: mod_base = OTHER; note = 2'O-methyl adenosine phosphorothioate
  modified_base 2: mod_base = OTHER; note = 2'O-methyl guanosine phosphorothioate
  modified_base 3: mod_base = OTHER; note = 2'O-methyl guanosine phosphorothioate
  modified_base 116: mod_base = OTHER; note = cytidine phosphorothioate
  modified_base 117: mod_base = OTHER; note = 2'O-methyl adenosine phosphorothioate
  modified_base 118: mod_base = OTHER; note = 2'O-methyl guanosine phosphorothioate
  modified_base 119: mod_base = OTHER; note = 2'O-methyl cytidine
aggctgtgctgaccatcgacgttttagagctagaaatagcaagttaaaataaggctagtccgttatcaacttgaaaaagtggcaccgagtcggtgctccctttctcgtcgatggtcagc

SEQ ID NO: 24307 - RNA, 118 nt, synthetic construct
  source 1..118: mol_type = other RNA
  modified_base 1: mod_base = OTHER; note = 2'O-methyl adenosine phosphorothioate
  modified_base 2: mod_base = OTHER; note = 2'O-methyl guanosine phosphorothioate
  modified_base 3: mod_base = OTHER; note = 2'O-methyl guanosine phosphorothioate
  modified_base 115: mod_base = OTHER; note = uridine phosphorothioate
  modified_base 116: mod_base = OTHER; note = 2'O-methyl cytidine phosphorothioate
  modified_base 117: mod_base = OTHER; note = 2'O-methyl adenosine phosphorothioate
  modified_base 118: mod_base = OTHER; note = 2'O-methyl guanosine
aggctgtgctgaccatcgacgttttagagctagaaatagcaagttaaaataaggctagtccgttatcaacttgaaaaagtggcaccgagtcggtgctccctttctcgtcgatggtcag

SEQ ID NO: 24308 - RNA, 117 nt, synthetic construct
  source 1..117: mol_type = other RNA
  modified_base 1: mod_base = OTHER; note = 2'O-methyl adenosine phosphorothioate
  modified_base 2: mod_base = OTHER; note = 2'O-methyl guanosine phosphorothioate
  modified_base 3: mod_base = OTHER; note = 2'O-methyl guanosine phosphorothioate
  modified_base 114: mod_base = OTHER; note = guanosine phosphorothioate
  modified_base 115: mod_base = OTHER; note = 2'O-methyl uridine phosphorothioate
  modified_base 116: mod_base = OTHER; note = 2'O-methyl cytidine phosphorothioate
  modified_base 117: mod_base = OTHER; note = 2'O-methyl adenosine
aggctgtgctgaccatcgacgttttagagctagaaatagcaagttaaaataaggctagtccgttatcaacttgaaaaagtggcaccgagtcggtgctccctttctcgtcgatggtca

SEQ ID NO: 24309 - RNA, 124 nt, synthetic construct
  source 1..124: mol_type = other RNA
  modified_base 1: mod_base = OTHER; note = 2'O-methyl adenosine phosphorothioate
  modified_base 2: mod_base = OTHER; note = 2'O-methyl guanosine phosphorothioate
  modified_base 3: mod_base = OTHER; note = 2'O-methyl guanosine phosphorothioate
  modified_base 121: mod_base = OTHER; note = guanosine phosphorothioate
  modified_base 122: mod_base = OTHER; note = 2'O-methyl cytidine phosphorothioate
  modified_base 123: mod_base = OTHER; note = 2'O-methyl cytidine phosphorothioate
  modified_base 124: mod_base = OTHER; note = 2'O-methyl uridine
aggctgtgctgaccatcgacgttttagagctagaaatagcaagttaaaataaggctagtccgttatcaacttgaaaaagtggcaccgagtcggtgccctttctcgtcgatggtcagcacagcct

SEQ ID NO: 24310 - RNA, 123 nt, synthetic construct
  source 1..123: mol_type = other RNA
  modified_base 1: mod_base = OTHER; note = 2'O-methyl adenosine phosphorothioate
  modified_base 2: mod_base = OTHER; note = 2'O-methyl guanosine phosphorothioate
  modified_base 3: mod_base = OTHER; note = 2'O-methyl guanosine phosphorothioate
  modified_base 120: mod_base = OTHER; note = adenosine phosphorothioate
  modified_base 121: mod_base = OTHER; note = 2'O-methyl guanosine phosphorothioate
  modified_base 122: mod_base = OTHER; note = 2'O-methyl cytidine phosphorothioate
  modified_base 123: mod_base = OTHER; note = 2'O-methyl cytidine
aggctgtgctgaccatcgacgttttagagctagaaatagcaagttaaaataaggctagtccgttatcaacttgaaaaagtggcaccgagtcggtgccctttctcgtcgatggtcagcacagcc

SEQ ID NO: 24311 - RNA, 122 nt, synthetic construct
  source 1..122: mol_type = other RNA
  modified_base 1: mod_base = OTHER; note = 2'O-methyl adenosine phosphorothioate
  modified_base 2: mod_base = OTHER; note = 2'O-methyl guanosine phosphorothioate
  modified_base 3: mod_base = OTHER; note = 2'O-methyl guanosine phosphorothioate
  modified_base 119: mod_base = OTHER; note = cytidine phosphorothioate
  modified_base 120: mod_base = OTHER; note = 2'O-methyl adenosine phosphorothioate
  modified_base 121: mod_base = OTHER; note = 2'O-methyl guanosine phosphorothioate
  modified_base 122: mod_base = OTHER; note = 2'O-methyl cytidine
aggctgtgctgaccatcgacgttttagagctagaaatagcaagttaaaataaggctagtccgttatcaacttgaaaaagtggcaccgagtcggtgccctttctcgtcgatggtcagcacagc

SEQ ID NO: 24312 - RNA, 121 nt, synthetic construct
  source 1..121: mol_type = other RNA
  modified_base 1: mod_base = OTHER; note = 2'O-methyl adenosine phosphorothioate
  modified_base 2: mod_base = OTHER; note = 2'O-methyl guanosine phosphorothioate
  modified_base 3: mod_base = OTHER; note = 2'O-methyl guanosine phosphorothioate
  modified_base 118: mod_base = OTHER; note = adenosine phosphorothioate
  modified_base 119: mod_base = OTHER; note = 2'O-methyl cytidine phosphorothioate
  modified_base 120: mod_base = OTHER; note = 2'O-methyl adenosine phosphorothioate
  modified_base 121: mod_base = OTHER; note = 2'O-methyl guanosine
aggctgtgctgaccatcgacgttttagagctagaaatagcaagttaaaataaggctagtccgttatcaacttgaaaaagtggcaccgagtcggtgccctttctcgtcgatggtcagcacag

SEQ ID NO: 24313 - RNA, 120 nt, synthetic construct
  source 1..120: mol_type = other RNA
  modified_base 1: mod_base = OTHER; note = 2'O-methyl adenosine phosphorothioate
  modified_base 2: mod_base = OTHER; note = 2'O-methyl guanosine phosphorothioate
  modified_base 3: mod_base = OTHER; note = 2'O-methyl guanosine phosphorothioate
  modified_base 117: mod_base = OTHER; note = cytidine phosphorothioate
  modified_base 118: mod_base = OTHER; note = 2'O-methyl adenosine phosphorothioate
  modified_base 119: mod_base = OTHER; note = 2'O-methyl cytidine phosphorothioate
  modified_base 120: mod_base = OTHER; note = 2'O-methyl adenosine
aggctgtgctgaccatcgacgttttagagctagaaatagcaagttaaaataaggctagtccgttatcaacttgaaaaagtggcaccgagtcggtgccctttctcgtcgatggtcagcaca

SEQ ID NO: 24314 - RNA, 119 nt, synthetic construct
  source 1..119: mol_type = other RNA
  modified_base 1: mod_base = OTHER; note = 2'O-methyl adenosine phosphorothioate
  modified_base 2: mod_base = OTHER; note = 2'O-methyl guanosine phosphorothioate
  modified_base 3: mod_base = OTHER; note = 2'O-methyl guanosine phosphorothioate
  modified_base 116: mod_base = OTHER; note = guanosine phosphorothioate
  modified_base 117: mod_base = OTHER; note = 2'O-methyl cytidine phosphorothioate
  modified_base 118: mod_base = OTHER; note = 2'O-methyl adenosine phosphorothioate
  modified_base 119: mod_base = OTHER; note = 2'O-methyl cytidine
aggctgtgctgaccatcgacgttttagagctagaaatagcaagttaaaataaggctagtccgttatcaacttgaaaaagtggcaccgagtcggtgccctttctcgtcgatggtcagcac

SEQ ID NO: 24315 - RNA, 118 nt, synthetic construct
  source 1..118: mol_type = other RNA
  modified_base 1: mod_base = OTHER; note = 2'O-methyl adenosine phosphorothioate
  modified_base 2: mod_base = OTHER; note = 2'O-methyl guanosine phosphorothioate
  modified_base 3: mod_base = OTHER; note = 2'O-methyl guanosine phosphorothioate
  modified_base 115: mod_base = OTHER; note = adenosine phosphorothioate
  modified_base 116: mod_base = OTHER; note = 2'O-methyl guanosine phosphorothioate
  modified_base 117: mod_base = OTHER; note = 2'O-methyl cytidine phosphorothioate
  modified_base 118: mod_base = OTHER; note = 2'O-methyl adenosine
aggctgtgctgaccatcgacgttttagagctagaaatagcaagttaaaataaggctagtccgttatcaacttgaaaaagtggcaccgagtcggtgccctttctcgtcgatggtcagca

SEQ ID NO: 24316 - RNA, 117 nt, synthetic construct
  source 1..117: mol_type = other RNA
  modified_base 1: mod_base = OTHER; note = 2'O-methyl adenosine phosphorothioate
  modified_base 2: mod_base = OTHER; note = 2'O-methyl guanosine phosphorothioate
  modified_base 3: mod_base = OTHER; note = 2'O-methyl guanosine phosphorothioate
  modified_base 114: mod_base = OTHER; note = cytidine phosphorothioate
  modified_base 115: mod_base = OTHER; note = 2'O-methyl adenosine phosphorothioate
  modified_base 116: mod_base = OTHER; note = 2'O-methyl guanosine phosphorothioate
  modified_base 117: mod_base = OTHER; note = 2'O-methyl cytidine
aggctgtgctgaccatcgacgttttagagctagaaatagcaagttaaaataaggctagtccgttatcaacttgaaaaagtggcaccgagtcggtgccctttctcgtcgatggtcagc

SEQ ID NO: 24317 - RNA, 116 nt, synthetic construct
  source 1..116: mol_type = other RNA
  modified_base 1: mod_base = OTHER; note = 2'O-methyl adenosine phosphorothioate
  modified_base 2: mod_base = OTHER; note = 2'O-methyl guanosine phosphorothioate
  modified_base 3: mod_base = OTHER; note = 2'O-methyl guanosine phosphorothioate
  modified_base 113: mod_base = OTHER; note = uridine phosphorothioate
  modified_base 114: mod_base = OTHER; note = 2'O-methyl cytidine phosphorothioate
  modified_base 115: mod_base = OTHER; note = 2'O-methyl adenosine phosphorothioate
  modified_base 116: mod_base = OTHER; note = 2'O-methyl guanosine
aggctgtgctgaccatcgacgttttagagctagaaatagcaagttaaaataaggctagtccgttatcaacttgaaaaagtggcaccgagtcggtgccctttctcgtcgatggtcag

SEQ ID NO: 24318 - RNA, 115 nt, synthetic construct
  source 1..115: mol_type = other RNA
  modified_base 1: mod_base = OTHER; note = 2'O-methyl adenosine phosphorothioate
  modified_base 2: mod_base = OTHER; note = 2'O-methyl guanosine phosphorothioate
  modified_base 3: mod_base = OTHER; note = 2'O-methyl guanosine phosphorothioate
  modified_base 112: mod_base = OTHER; note = guanosine phosphorothioate
  modified_base 113: mod_base = OTHER; note = 2'O-methyl uridine phosphorothioate
  modified_base 114: mod_base = OTHER; note = 2'O-methyl cytidine phosphorothioate
  modified_base 115: mod_base = OTHER; note = 2'O-methyl adenosine
aggctgtgctgaccatcgacgttttagagctagaaatagcaagttaaaataaggctagtccgttatcaacttgaaaaagtggcaccgagtcggtgccctttctcgtcgatggtca

SEQ ID NO: 24319 - RNA, 122 nt, synthetic construct
  source 1..122: mol_type = other RNA
  modified_base 1: mod_base = OTHER; note = 2'O-methyl adenosine phosphorothioate
  modified_base 2: mod_base = OTHER; note = 2'O-methyl guanosine phosphorothioate
  modified_base 3: mod_base = OTHER; note = 2'O-methyl guanosine phosphorothioate
  modified_base 119: mod_base = OTHER; note = guanosine phosphorothioate
  modified_base 120: mod_base = OTHER; note = 2'O-methyl cytidine phosphorothioate
  modified_base 121: mod_base = OTHER; note = 2'O-methyl cytidine phosphorothioate
  modified_base 122: mod_base = OTHER; note = 2'O-methyl uridine
aggctgtgctgaccatcgacgttttagagctagaaatagcaagttaaaataaggctagtccgttatcaacttgaaaaagtggcaccgagtcggtgctttctcgtcgatggtcagcacagcct

SEQ ID NO: 24320 - RNA, 121 nt, synthetic construct
  source 1..121: mol_type = other RNA
  modified_base 1: mod_base = OTHER; note = 2'O-methyl adenosine phosphorothioate
  modified_base 2: mod_base = OTHER; note = 2'O-methyl guanosine phosphorothioate
  modified_base 3: mod_base = OTHER; note = 2'O-methyl guanosine phosphorothioate
  modified_base 118: mod_base = OTHER; note = adenosine phosphorothioate
  modified_base 119: mod_base = OTHER; note = 2'O-methyl guanosine phosphorothioate
  modified_base 120: mod_base = OTHER; note = 2'O-methyl cytidine phosphorothioate
  modified_base 121: mod_base = OTHER; note = 2'O-methyl cytidine
aggctgtgctgaccatcgacgttttagagctagaaatagcaagttaaaataaggctagtccgttatcaacttgaaaaagtggcaccgagtcggtgctttctcgtcgatggtcagcacagcc

SEQ ID NO: 24321 - RNA, 120 nt, synthetic construct
  source 1..120: mol_type = other RNA
  modified_base 1: mod_base = OTHER; note = 2'O-methyl adenosine phosphorothioate
  modified_base 2: mod_base = OTHER; note = 2'O-methyl guanosine phosphorothioate
  modified_base 3: mod_base = OTHER; note = 2'O-methyl guanosine phosphorothioate
  modified_base 117: mod_base = OTHER; note = cytidine phosphorothioate
  modified_base 118: mod_base = OTHER; note = 2'O-methyl adenosine phosphorothioate
  modified_base 119: mod_base = OTHER; note = 2'O-methyl guanosine phosphorothioate
  modified_base 120: mod_base = OTHER; note = 2'O-methyl cytidine
aggctgtgctgaccatcgacgttttagagctagaaatagcaagttaaaataaggctagtccgttatcaacttgaaaaagtggcaccgagtcggtgctttctcgtcgatggtcagcacagc

SEQ ID NO: 24322 - RNA, 119 nt, synthetic construct
  source 1..119: mol_type = other RNA
  modified_base 1: mod_base = OTHER; note = 2'O-methyl adenosine phosphorothioate
  modified_base 2: mod_base = OTHER; note = 2'O-methyl guanosine phosphorothioate
  modified_base 3: mod_base = OTHER; note = 2'O-methyl guanosine phosphorothioate
  modified_base 116: mod_base = OTHER; note = adenosine phosphorothioate
  modified_base 117: mod_base = OTHER; note = 2'O-methyl cytidine phosphorothioate
  modified_base 118: mod_base = OTHER; note = 2'O-methyl adenosine phosphorothioate
  modified_base 119: mod_base = OTHER; note = 2'O-methyl guanosine
aggctgtgctgaccatcgacgttttagagctagaaatagcaagttaaaataaggctagtccgttatcaacttgaaaaagtggcaccgagtcggtgctttctcgtcgatggtcagcacag

SEQ ID NO: 24323 - RNA, 118 nt, synthetic construct
  source 1..118: mol_type = other RNA
  modified_base 1: mod_base = OTHER; note = 2'O-methyl adenosine phosphorothioate
  modified_base 2: mod_base = OTHER; note = 2'O-methyl guanosine phosphorothioate
  modified_base 3: mod_base = OTHER; note = 2'O-methyl guanosine phosphorothioate
  modified_base 115: mod_base = OTHER; note = cytidine phosphorothioate
  modified_base 116: mod_base = OTHER; note = 2'O-methyl adenosine phosphorothioate
  modified_base 117: mod_base = OTHER; note = 2'O-methyl cytidine phosphorothioate
  modified_base 118: mod_base = OTHER; note = 2'O-methyl adenosine
aggctgtgctgaccatcgacgttttagagctagaaatagcaagttaaaataaggctagtccgttatcaacttgaaaaagtggcaccgagtcggtgctttctcgtcgatggtcagcaca

SEQ ID NO: 24324 - RNA, 117 nt, synthetic construct
  source 1..117: mol_type = other RNA
  modified_base 1: mod_base = OTHER; note = 2'O-methyl adenosine phosphorothioate
  modified_base 2: mod_base = OTHER; note = 2'O-methyl guanosine phosphorothioate
  modified_base 3: mod_base = OTHER; note = 2'O-methyl guanosine phosphorothioate
  modified_base 114: mod_base = OTHER; note = guanosine phosphorothioate
  modified_base 115: mod_base = OTHER; note = 2'O-methyl cytidine phosphorothioate
  modified_base 116: mod_base = OTHER; note = 2'O-methyl adenosine phosphorothioate
  modified_base 117: mod_base = OTHER; note = 2'O-methyl cytidine
aggctgtgctgaccatcgacgttttagagctagaaatagcaagttaaaataaggctagtccgttatcaacttgaaaaagtggcaccgagtcggtgctttctcgtcgatggtcagcac

SEQ ID NO: 24325 - RNA, 116 nt, synthetic construct
  source 1..116: mol_type = other RNA
  modified_base 1: mod_base = OTHER; note = 2'O-methyl adenosine phosphorothioate
  modified_base 2: mod_base = OTHER; note = 2'O-methyl guanosine phosphorothioate
  modified_base 3: mod_base = OTHER; note = 2'O-methyl guanosine phosphorothioate
  modified_base 113: mod_base = OTHER; note = adenosine phosphorothioate
  modified_base 114: mod_base = OTHER; note = 2'O-methyl guanosine phosphorothioate
  modified_base 115: mod_base = OTHER; note = 2'O-methyl cytidine phosphorothioate
  modified_base 116: mod_base = OTHER; note = 2'O-methyl adenosine
aggctgtgctgaccatcgacgttttagagctagaaatagcaagttaaaataaggctagtccgttatcaacttgaaaaagtggcaccgagtcggtgctttctcgtcgatggtcagca

SEQ ID NO: 24326 - RNA, 115 nt, synthetic construct
  source 1..115: mol_type = other RNA
  modified_base 1: mod_base = OTHER; note = 2'O-methyl adenosine phosphorothioate
  modified_base 2: mod_base = OTHER; note = 2'O-methyl guanosine phosphorothioate
  modified_base 3: mod_base = OTHER; note = 2'O-methyl guanosine phosphorothioate
  modified_base 112: mod_base = OTHER; note = cytidine phosphorothioate
  modified_base 113: mod_base = OTHER; note = 2'O-methyl adenosine phosphorothioate
  modified_base 114: mod_base = OTHER; note = 2'O-methyl guanosine phosphorothioate
  modified_base 115: mod_base = OTHER; note = 2'O-methyl cytidine
aggctgtgctgaccatcgacgttttagagctagaaatagcaagttaaaataaggctagtccgttatcaacttgaaaaagtggcaccgagtcggtgctttctcgtcgatggtcagc

SEQ ID NO: 24327 - RNA, 114 nt, synthetic construct
  source 1..114: mol_type = other RNA
  modified_base 1: mod_base = OTHER; note = 2'O-methyl adenosine phosphorothioate
  modified_base 2: mod_base = OTHER; note = 2'O-methyl guanosine phosphorothioate
  modified_base 3: mod_base = OTHER; note = 2'O-methyl guanosine phosphorothioate
  modified_base 111: mod_base = OTHER; note = uridine phosphorothioate
  modified_base 112: mod_base = OTHER; note = 2'O-methyl cytidine phosphorothioate
  modified_base 113: mod_base = OTHER; note = 2'O-methyl adenosine phosphorothioate
  modified_base 114: mod_base = OTHER; note = 2'O-methyl guanosine
aggctgtgctgaccatcgacgttttagagctagaaatagcaagttaaaataaggctagtccgttatcaacttgaaaaagtggcaccgagtcggtgctttctcgtcgatggtcag

SEQ ID NO: 24328 - RNA, 113 nt, synthetic construct
  source 1..113: mol_type = other RNA
  modified_base 1: mod_base = OTHER; note = 2'O-methyl adenosine phosphorothioate
  modified_base 2: mod_base = OTHER; note = 2'O-methyl guanosine phosphorothioate
  modified_base 3: mod_base = OTHER; note = 2'O-methyl guanosine phosphorothioate
  modified_base 110: mod_base = OTHER; note = guanosine phosphorothioate
  modified_base 111: mod_base = OTHER; note = 2'O-methyl uridine phosphorothioate
  modified_base 112: mod_base = OTHER; note = 2'O-methyl cytidine phosphorothioate
  modified_base 113: mod_base = OTHER; note = 2'O-methyl adenosine
aggctgtgctgaccatcgacgttttagagctagaaatagcaagttaaaataaggctagtccgttatcaacttgaaaaagtggcaccgagtcggtgctttctcgtcgatggtca

SEQ ID NO: 24329 - RNA, 120 nt, synthetic construct
  source 1..120: mol_type = other RNA
  modified_base 1: mod_base = OTHER; note = 2'O-methyl adenosine phosphorothioate
  modified_base 2: mod_base = OTHER; note = 2'O-methyl guanosine phosphorothioate
  modified_base 3: mod_base = OTHER; note = 2'O-methyl guanosine phosphorothioate
  modified_base 117: mod_base = OTHER; note = guanosine phosphorothioate
  modified_base 118: mod_base = OTHER; note = 2'O-methyl cytidine phosphorothioate
  modified_base 119: mod_base = OTHER; note = 2'O-methyl cytidine phosphorothioate
  modified_base 120: mod_base = OTHER; note = 2'O-methyl uridine
aggctgtgctgaccatcgacgttttagagctagaaatagcaagttaaaataaggctagtccgttatcaacttgaaaaagtggcaccgagtcggtgctctcgtcgatggtcagcacagcct

SEQ ID NO: 24330 - RNA, 119 nt, synthetic construct
  source 1..119: mol_type = other RNA
  modified_base 1: mod_base = OTHER; note = 2'O-methyl adenosine phosphorothioate
  modified_base 2: mod_base = OTHER; note = 2'O-methyl guanosine phosphorothioate
  modified_base 3: mod_base = OTHER; note = 2'O-methyl guanosine phosphorothioate
  modified_base 116: mod_base = OTHER; note = adenosine phosphorothioate
  modified_base 117: mod_base = OTHER; note = 2'O-methyl guanosine phosphorothioate
  modified_base 118: mod_base = OTHER; note = 2'O-methyl cytidine phosphorothioate
  modified_base 119: mod_base = OTHER; note = 2'O-methyl cytidine
aggctgtgctgaccatcgacgttttagagctagaaatagcaagttaaaataaggctagtccgttatcaacttgaaaaagtggcaccgagtcggtgctctcgtcgatggtcagcacagcc

SEQ ID NO: 24331 - RNA, 118 nt, synthetic construct
  source 1..118: mol_type = other RNA
  modified_base 1: mod_base = OTHER; note = 2'O-methyl adenosine phosphorothioate
  modified_base 2: mod_base = OTHER; note = 2'O-methyl guanosine phosphorothioate
  modified_base 3: mod_base = OTHER; note = 2'O-methyl guanosine phosphorothioate
  modified_base 115: mod_base = OTHER; note = cytidine phosphorothioate
  modified_base 116: mod_base = OTHER; note = 2'O-methyl adenosine phosphorothioate
  modified_base 117: mod_base = OTHER; note = 2'O-methyl guanosine phosphorothioate
  modified_base 118: mod_base = OTHER; note = 2'O-methyl cytidine
aggctgtgctgaccatcgacgttttagagctagaaatagcaagttaaaataaggctagtccgttatcaacttgaaaaagtggcaccgagtcggtgctctcgtcgatggtcagcacagc

SEQ ID NO: 24332 - RNA, 117 nt, synthetic construct
  source 1..117: mol_type = other RNA
  modified_base 1: mod_base = OTHER; note = 2'O-methyl adenosine phosphorothioate
  modified_base 2: mod_base = OTHER; note = 2'O-methyl guanosine phosphorothioate
  modified_base 3: mod_base = OTHER; note = 2'O-methyl guanosine phosphorothioate
  modified_base 114: mod_base = OTHER; note = adenosine phosphorothioate
  modified_base 115: mod_base = OTHER; note = 2'O-methyl cytidine phosphorothioate
  modified_base 116: mod_base = OTHER; note = 2'O-methyl adenosine phosphorothioate
  modified_base 117: mod_base = OTHER; note = 2'O-methyl guanosine
aggctgtgctgaccatcgacgttttagagctagaaatagcaagttaaaataaggctagtccgttatcaacttgaaaaagtggcaccgagtcggtgctctcgtcgatggtcagcacag

SEQ ID NO: 24333 - RNA, 116 nt, synthetic construct
  source 1..116: mol_type = other RNA
  modified_base 1: mod_base = OTHER; note = 2'O-methyl adenosine phosphorothioate
  modified_base 2: mod_base = OTHER; note = 2'O-methyl guanosine phosphorothioate
  modified_base 3: mod_base = OTHER; note = 2'O-methyl guanosine phosphorothioate
  modified_base 113: mod_base = OTHER; note = cytidine phosphorothioate
  modified_base 114: mod_base = OTHER; note = 2'O-methyl adenosine phosphorothioate
  modified_base 115: mod_base = OTHER; note = 2'O-methyl cytidine phosphorothioate
  modified_base 116: mod_base = OTHER; note = 2'O-methyl adenosine
aggctgtgctgaccatcgacgttttagagctagaaatagcaagttaaaataaggctagtccgttatcaacttgaaaaagtggcaccgagtcggtgctctcgtcgatggtcagcaca

SEQ ID NO: 24334 - RNA, 115 nt, synthetic construct
  source 1..115: mol_type = other RNA
  modified_base 1: mod_base = OTHER; note = 2'O-methyl adenosine phosphorothioate
  modified_base 2: mod_base = OTHER; note = 2'O-methyl guanosine phosphorothioate
  modified_base 3: mod_base = OTHER; note = 2'O-methyl guanosine phosphorothioate
  modified_base 112: mod_base = OTHER; note = guanosine phosphorothioate
  modified_base 113: mod_base = OTHER; note = 2'O-methyl cytidine phosphorothioate
  modified_base 114: mod_base = OTHER; note = 2'O-methyl adenosine phosphorothioate
  modified_base 115: mod_base = OTHER; note = 2'O-methyl cytidine
aggctgtgctgaccatcgacgttttagagctagaaatagcaagttaaaataaggctagtccgttatcaacttgaaaaagtggcaccgagtcggtgctctcgtcgatggtcagcac

SEQ ID NO: 24335 - RNA, 114 nt, synthetic construct
  source 1..114: mol_type = other RNA
  modified_base 1: mod_base = OTHER; note = 2'O-methyl adenosine phosphorothioate
  modified_base 2: mod_base = OTHER; note = 2'O-methyl guanosine phosphorothioate
  modified_base 3: mod_base = OTHER; note = 2'O-methyl guanosine phosphorothioate
  modified_base 111: mod_base = OTHER; note = adenosine phosphorothioate
  modified_base 112: mod_base = OTHER; note = 2'O-methyl guanosine phosphorothioate
  modified_base 113: mod_base = OTHER; note = 2'O-methyl cytidine phosphorothioate
  modified_base 114: mod_base = OTHER; note = 2'O-methyl adenosine
aggctgtgctgaccatcgacgttttagagctagaaatagcaagttaaaataaggctagtccgttatcaacttgaaaaagtggcaccgagtcggtgctctcgtcgatggtcagca

SEQ ID NO: 24336 - RNA, 113 nt, synthetic construct
  source 1..113: mol_type = other RNA
  modified_base 1: mod_base = OTHER; note = 2'O-methyl adenosine phosphorothioate
  modified_base 2: mod_base = OTHER; note = 2'O-methyl guanosine phosphorothioate
  modified_base 3: mod_base = OTHER; note = 2'O-methyl guanosine phosphorothioate
  modified_base 110: mod_base = OTHER; note = cytidine phosphorothioate
  modified_base 111: mod_base = OTHER; note = 2'O-methyl adenosine phosphorothioate
  modified_base 112: mod_base = OTHER; note = 2'O-methyl guanosine phosphorothioate
  modified_base 113: mod_base = OTHER; note = 2'O-methyl cytidine
aggctgtgctgaccatcgacgttttagagctagaaatagcaagttaaaataaggctagtccgttatcaacttgaaaaagtggcaccgagtcggtgctctcgtcgatggtcagc

SEQ ID NO: 24337 - RNA, 112 nt, synthetic construct
  source 1..112: mol_type = other RNA
  modified_base 1: mod_base = OTHER; note = 2'O-methyl adenosine phosphorothioate
  modified_base 2: mod_base = OTHER; note = 2'O-methyl guanosine phosphorothioate
  modified_base 3: mod_base = OTHER; note = 2'O-methyl guanosine phosphorothioate
  modified_base 109: mod_base = OTHER; note = uridine phosphorothioate
  modified_base 110: mod_base = OTHER; note = 2'O-methyl cytidine phosphorothioate
  modified_base 111: mod_base = OTHER; note = 2'O-methyl adenosine phosphorothioate
  modified_base 112: mod_base = OTHER; note = 2'O-methyl guanosine
aggctgtgctgaccatcgacgttttagagctagaaatagcaagttaaaataaggctagtccgttatcaacttgaaaaagtggcaccgagtcggtgctctcgtcgatggtcag

SEQ ID NO: 24338 - RNA, 111 nt, synthetic construct
  source 1..111: mol_type = other RNA
  modified_base 1: mod_base = OTHER; note = 2'O-methyl adenosine phosphorothioate
  modified_base 2: mod_base = OTHER; note = 2'O-methyl guanosine phosphorothioate
  modified_base 3: mod_base = OTHER; note = 2'O-methyl guanosine phosphorothioate
  modified_base 108: mod_base = OTHER; note = guanosine phosphorothioate
  modified_base 109: mod_base = OTHER; note = 2'O-methyl uridine phosphorothioate
  modified_base 110: mod_base = OTHER; note = 2'O-methyl cytidine phosphorothioate
  modified_base 111: mod_base = OTHER; note = 2'O-methyl adenosine
aggctgtgctgaccatcgacgttttagagctagaaatagcaagttaaaataaggctagtccgttatcaacttgaaaaagtggcaccgagtcggtgctctcgtcgatggtca

SEQ ID NO: 24339 - RNA, 156 nt, synthetic construct
  source 1..156: mol_type = other RNA
  modified_base 1: mod_base = OTHER; note = 2'O-methyl adenosine phosphorothioate
  modified_base 2: mod_base = OTHER; note = 2'O-methyl adenosine phosphorothioate
  modified_base 3: mod_base = OTHER; note = 2'O-methyl guanosine phosphorothioate
  modified_base 153: mod_base = OTHER; note = cytidine phosphorothioate
  modified_base 154: mod_base = OTHER; note = 2'O-methyl cytidine phosphorothioate
  modified_base 155: mod_base = OTHER; note = 2'O-methyl uridine phosphorothioate
  modified_base 156: mod_base = OTHER; note = 2'O-methyl uridine
aaggctgtgctgaccatcgagtctttgtactctggtaccagaagctacaaagataaggcttcatgccgaaatcaacaccctgtcattttatggcagggtgttttacatggccccagcagcttcagtccctttctcgtcgatggtcagcacagcctt

SEQ ID NO: 24340 - RNA, 155 nt, synthetic construct
  source 1..155: mol_type = other RNA
  modified_base 1: mod_base = OTHER; note = 2'O-methyl adenosine phosphorothioate
  modified_base 2: mod_base = OTHER; note = 2'O-methyl adenosine phosphorothioate
  modified_base 3: mod_base = OTHER; note = 2'O-methyl guanosine phosphorothioate
  modified_base 152: mod_base = OTHER; note = guanosine phosphorothioate
  modified_base 153: mod_base = OTHER; note = 2'O-methyl cytidine phosphorothioate
  modified_base 154: mod_base = OTHER; note = 2'O-methyl cytidine phosphorothioate
  modified_base 155: mod_base = OTHER; note = 2'O-methyl uridine
aaggctgtgctgaccatcgagtctttgtactctggtaccagaagctacaaagataaggcttcatgccgaaatcaacaccctgtcattttatggcagggtgttttacatggccccagcagcttcagtccctttctcgtcgatggtcagcacagcct

SEQ ID NO: 24341 - RNA, 154 nt, synthetic construct
  source 1..154: mol_type = other RNA
  modified_base 1: mod_base = OTHER; note = 2'O-methyl adenosine phosphorothioate
  modified_base 2: mod_base = OTHER; note = 2'O-methyl adenosine phosphorothioate
  modified_base 3: mod_base = OTHER; note = 2'O-methyl guanosine phosphorothioate
  modified_base 151: mod_base = OTHER; note = adenosine phosphorothioate
  modified_base 152: mod_base = OTHER; note = 2'O-methyl guanosine phosphorothioate
  modified_base 153: mod_base = OTHER; note = 2'O-methyl cytidine phosphorothioate
  modified_base 154: mod_base = OTHER; note = 2'O-methyl cytidine
aaggctgtgctgaccatcgagtctttgtactctggtaccagaagctacaaagataaggcttcatgccgaaatcaacaccctgtcattttatggcagggtgttttacatggccccagcagcttcagtccctttctcgtcgatggtcagcacagcc

SEQ ID NO: 24342 - RNA, 153 nt, synthetic construct
  source 1..153: mol_type = other RNA
  modified_base 1: mod_base = OTHER; note = 2'O-methyl adenosine phosphorothioate
  modified_base 2: mod_base = OTHER; note = 2'O-methyl adenosine phosphorothioate
  modified_base 3: mod_base = OTHER; note = 2'O-methyl guanosine phosphorothioate
  modified_base 150: mod_base = OTHER; note = cytidine phosphorothioate
  modified_base 151: mod_base = OTHER; note = 2'O-methyl adenosine phosphorothioate
  modified_base 152: mod_base = OTHER; note = 2'O-methyl guanosine phosphorothioate
  modified_base 153: mod_base = OTHER; note = 2'O-methyl cytidine
aaggctgtgctgaccatcgagtctttgtactctggtaccagaagctacaaagataaggcttcatgccgaaatcaacaccctgtcattttatggcagggtgttttacatggccccagcagcttcagtccctttctcgtcgatggtcagcacagc

SEQ ID NO: 24343 - RNA, 152 nt, synthetic construct
  source 1..152: mol_type = other RNA
  modified_base 1: mod_base = OTHER; note = 2'O-methyl adenosine phosphorothioate
  modified_base 2: mod_base = OTHER; note = 2'O-methyl adenosine phosphorothioate
  modified_base 3: mod_base = OTHER; note = 2'O-methyl guanosine phosphorothioate
  modified_base 149: mod_base = OTHER; note = adenosine phosphorothioate
  modified_base 150: mod_base = OTHER; note = 2'O-methyl cytidine phosphorothioate
  modified_base 151: mod_base = OTHER; note = 2'O-methyl adenosine phosphorothioate
  modified_base 152: mod_base = OTHER; note = 2'O-methyl guanosine
aaggctgtgctgaccatcgagtctttgtactctggtaccagaagctacaaagataaggcttcatgccgaaatcaacaccctgtcattttatggcagggtgttttacatggccccagcagcttcagtccctttctcgtcgatggtcagcacag

SEQ ID NO: 24344 - RNA, 151 nt, synthetic construct
  source 1..151: mol_type = other RNA
  modified_base 1: mod_base = OTHER; note = 2'O-methyl adenosine phosphorothioate
  modified_base 2: mod_base = OTHER; note = 2'O-methyl adenosine phosphorothioate
  modified_base 3: mod_base = OTHER; note = 2'O-methyl guanosine phosphorothioate
  modified_base 148: mod_base = OTHER; note = cytidine phosphorothioate
  modified_base 149: mod_base = OTHER; note = 2'O-methyl adenosine phosphorothioate
  modified_base 150: mod_base = OTHER; note = 2'O-methyl cytidine phosphorothioate
  modified_base 151: mod_base = OTHER; note = 2'O-methyl adenosine
aaggctgtgctgaccatcgagtctttgtactctggtaccagaagctacaaagataaggcttcatgccgaaatcaacaccctgtcattttatggcagggtgttttacatggccccagcagcttcagtccctttctcgtcgatggtcagcaca

SEQ ID NO: 24345 - RNA, 150 nt, synthetic construct
  source 1..150: mol_type = other RNA
  modified_base 1: mod_base = OTHER; note = 2'O-methyl adenosine phosphorothioate
  modified_base 2: mod_base = OTHER; note = 2'O-methyl adenosine phosphorothioate
  modified_base 3: mod_base = OTHER; note = 2'O-methyl guanosine phosphorothioate
  modified_base 147: mod_base = OTHER; note = guanosine phosphorothioate
  modified_base 148: mod_base = OTHER; note = 2'O-methyl cytidine phosphorothioate
  modified_base 149: mod_base = OTHER; note = 2'O-methyl adenosine phosphorothioate
  modified_base 150: mod_base = OTHER; note = 2'O-methyl cytidine
aaggctgtgctgaccatcgagtctttgtactctggtaccagaagctacaaagataaggcttcatgccgaaatcaacaccctgtcattttatggcagggtgttttacatggccccagcagcttcagtccctttctcgtcgatggtcagcac

SEQ ID NO: 24346 - RNA, 149 nt, synthetic construct
  source 1..149: mol_type = other RNA
  modified_base 1: mod_base = OTHER; note = 2'O-methyl adenosine phosphorothioate
  modified_base 2: mod_base = OTHER; note = 2'O-methyl adenosine phosphorothioate
  modified_base 3: mod_base = OTHER; note = 2'O-methyl guanosine phosphorothioate
  modified_base 146: mod_base = OTHER; note = adenosine phosphorothioate
  modified_base 147: mod_base = OTHER; note = 2'O-methyl guanosine phosphorothioate
  modified_base 148: mod_base = OTHER; note = 2'O-methyl cytidine phosphorothioate
  modified_base 149: mod_base = OTHER; note = 2'O-methyl adenosine
aaggctgtgctgaccatcgagtctttgtactctggtaccagaagctacaaagataaggcttcatgccgaaatcaacaccctgtcattttatggcagggtgttttacatggccccagcagcttcagtccctttctcgtcgatggtcagca

SEQ ID NO: 24347 - RNA, 148 nt, synthetic construct
  source 1..148: mol_type = other RNA
  modified_base 1: mod_base = OTHER; note = 2'O-methyl adenosine phosphorothioate
  modified_base 2: mod_base = OTHER; note = 2'O-methyl adenosine phosphorothioate
  modified_base 3: mod_base = OTHER; note = 2'O-methyl guanosine phosphorothioate
  modified_base 145: mod_base = OTHER; note = cytidine phosphorothioate
  modified_base 146: mod_base = OTHER; note = 2'O-methyl adenosine phosphorothioate
  modified_base 147: mod_base = OTHER; note = 2'O-methyl guanosine phosphorothioate
  modified_base 148: mod_base = OTHER; note = 2'O-methyl cytidine
aaggctgtgctgaccatcgagtctttgtactctggtaccagaagctacaaagataaggcttcatgccgaaatcaacaccctgtcattttatggcagggtgttttacatggccccagcagcttcagtccctttctcgtcgatggtcagc

SEQ ID NO: 24348 - RNA, 147 nt, synthetic construct
  source 1..147: mol_type = other RNA
  modified_base 1: mod_base = OTHER; note = 2'O-methyl adenosine phosphorothioate
  modified_base 2: mod_base = OTHER; note = 2'O-methyl adenosine phosphorothioate
  modified_base 3: mod_base = OTHER; note = 2'O-methyl guanosine phosphorothioate
  modified_base 144: mod_base = OTHER; note = uridine phosphorothioate
  modified_base 145: mod_base = OTHER; note = 2'O-methyl cytidine phosphorothioate
  modified_base 146: mod_base = OTHER; note = 2'O-methyl adenosine phosphorothioate
  modified_base 147: mod_base = OTHER; note = 2'O-methyl guanosine
aaggctgtgctgaccatcgagtctttgtactctggtaccagaagctacaaagataaggcttcatgccgaaatcaacaccctgtcattttatggcagggtgttttacatggccccagcagcttcagtccctttctcgtcgatggtcag

SEQ ID NO: 24349 - RNA, 151 nt, synthetic construct
  source 1..151: mol_type = other RNA
  modified_base 1: mod_base = OTHER; note = 2'O-methyl adenosine phosphorothioate
  modified_base 2: mod_base = OTHER; note = 2'O-methyl adenosine phosphorothioate
  modified_base 3: mod_base = OTHER; note = 2'O-methyl guanosine phosphorothioate
  modified_base 148: mod_base = OTHER; note = cytidine phosphorothioate
  modified_base 149: mod_base = OTHER; note = 2'O-methyl cytidine phosphorothioate
  modified_base 150: mod_base = OTHER; note = 2'O-methyl uridine phosphorothioate
  modified_base 151: mod_base = OTHER; note = 2'O-methyl uridine
aaggctgtgctgaccatcgagtctttgtactctggtaccagaagctacaaagataaggcttcatgccgaaatcaacaccctgtcattttatggcagggtgttttgccccagcagcttcagtccctttctcgtcgatggtcagcacagcctt

SEQ ID NO: 24350 - RNA, 150 nt, synthetic construct
  source 1..150: mol_type = other RNA
  modified_base 1: mod_base = OTHER; note = 2'O-methyl adenosine phosphorothioate
  modified_base 2: mod_base = OTHER; note = 2'O-methyl adenosine phosphorothioate
  modified_base 3: mod_base = OTHER; note = 2'O-methyl guanosine phosphorothioate
  modified_base 147: mod_base = OTHER; note = guanosine phosphorothioate
  modified_base 148: mod_base = OTHER; note = 2'O-methyl cytidine phosphorothioate
  modified_base 149: mod_base = OTHER; note = 2'O-methyl cytidine phosphorothioate
  modified_base 150: mod_base = OTHER; note = 2'O-methyl uridine
aaggctgtgctgaccatcgagtctttgtactctggtaccagaagctacaaagataaggcttcatgccgaaatcaacaccctgtcattttatggcagggtgttttgccccagcagcttcagtccctttctcgtcgatggtcagcacagcct

SEQ ID NO: 24351 - RNA, 149 nt, synthetic construct
  source 1..149: mol_type = other RNA
  modified_base 1: mod_base = OTHER; note = 2'O-methyl adenosine phosphorothioate
  modified_base 2: mod_base = OTHER; note = 2'O-methyl adenosine phosphorothioate
  modified_base 3: mod_base = OTHER; note = 2'O-methyl guanosine phosphorothioate
  modified_base 146: mod_base = OTHER; note = adenosine phosphorothioate
  modified_base 147: mod_base = OTHER; note = 2'O-methyl guanosine phosphorothioate
  modified_base 148: mod_base = OTHER; note = 2'O-methyl cytidine phosphorothioate
  modified_base 149: mod_base = OTHER; note = 2'O-methyl cytidine
aaggctgtgctgaccatcgagtctttgtactctggtaccagaagctacaaagataaggcttcatgccgaaatcaacaccctgtcattttatggcagggtgttttgccccagcagcttcagtccctttctcgtcgatggtcagcacagcc

SEQ ID NO: 24352 - RNA, 148 nt, synthetic construct
  source 1..148: mol_type = other RNA
  modified_base 1: mod_base = OTHER; note = 2'O-methyl adenosine phosphorothioate
  modified_base 2: mod_base = OTHER; note = 2'O-methyl adenosine phosphorothioate
  modified_base 3: mod_base = OTHER; note = 2'O-methyl guanosine phosphorothioate
  modified_base 145: mod_base = OTHER; note = cytidine phosphorothioate
  modified_base 146: mod_base = OTHER; note = 2'O-methyl adenosine phosphorothioate
  modified_base 147: mod_base = OTHER; note = 2'O-methyl guanosine phosphorothioate
  modified_base 148: mod_base = OTHER; note = 2'O-methyl cytidine
aaggctgtgctgaccatcgagtctttgtactctggtaccagaagctacaaagataaggcttcatgccgaaatcaacaccctgtcattttatggcagggtgttttgccccagcagcttcagtccctttctcgtcgatggtcagcacagc

SEQ ID NO: 24353 - RNA, 147 nt, synthetic construct
  source 1..147: mol_type = other RNA
  modified_base 1: mod_base = OTHER; note = 2'O-methyl adenosine phosphorothioate
  modified_base 2: mod_base = OTHER; note = 2'O-methyl adenosine phosphorothioate
  modified_base 3: mod_base = OTHER; note = 2'O-methyl guanosine phosphorothioate
  modified_base 144: mod_base = OTHER; note = adenosine phosphorothioate
  modified_base 145: mod_base = OTHER; note = 2'O-methyl cytidine phosphorothioate
  modified_base 146: mod_base = OTHER; note = 2'O-methyl adenosine phosphorothioate
  modified_base 147: mod_base = OTHER; note = 2'O-methyl guanosine
aaggctgtgctgaccatcgagtctttgtactctggtaccagaagctacaaagataaggcttcatgccgaaatcaacaccctgtcattttatggcagggtgttttgccccagcagcttcagtccctttctcgtcgatggtcagcacag

SEQ ID NO: 24354 - RNA, 146 nt, synthetic construct
  source 1..146: mol_type = other RNA
  modified_base 1: mod_base = OTHER; note = 2'O-methyl adenosine phosphorothioate
  modified_base 2: mod_base = OTHER; note = 2'O-methyl adenosine phosphorothioate
  modified_base 3: mod_base = OTHER; note = 2'O-methyl guanosine phosphorothioate
  modified_base 143: mod_base = OTHER; note = cytidine phosphorothioate
  modified_base 144: mod_base = OTHER; note = 2'O-methyl adenosine phosphorothioate
  modified_base 145: mod_base = OTHER; note = 2'O-methyl cytidine phosphorothioate
  modified_base 146: mod_base = OTHER; note = 2'O-methyl adenosine
aaggctgtgctgaccatcgagtctttgtactctggtaccagaagctacaaagataaggcttcatgccgaaatcaacaccctgtcattttatggcagggtgttttgccccagcagcttcagtccctttctcgtcgatggtcagcaca

SEQ ID NO: 24355 - RNA, 145 nt, synthetic construct
  source 1..145: mol_type = other RNA
  modified_base 1: mod_base = OTHER; note = 2'O-methyl adenosine phosphorothioate
  modified_base 2: mod_base = OTHER; note = 2'O-methyl adenosine phosphorothioate
  modified_base 3: mod_base = OTHER; note = 2'O-methyl guanosine phosphorothioate
  modified_base 142: mod_base = OTHER; note = guanosine phosphorothioate
  modified_base 143: mod_base = OTHER; note = 2'O-methyl cytidine phosphorothioate
  modified_base 144: mod_base = OTHER; note = 2'O-methyl adenosine phosphorothioate
  modified_base 145: mod_base = OTHER; note = 2'O-methyl cytidine
aaggctgtgctgaccatcgagtctttgtactctggtaccagaagctacaaagataaggcttcatgccgaaatcaacaccctgtcattttatggcagggtgttttgccccagcagcttcagtccctttctcgtcgatggtcagcac

SEQ ID NO: 24356 - RNA, 144 nt, synthetic construct
  source 1..144: mol_type = other RNA
  modified_base 1: mod_base = OTHER; note = 2'O-methyl adenosine phosphorothioate
  modified_base 2: mod_base = OTHER; note = 2'O-methyl adenosine phosphorothioate
  modified_base 3: mod_base = OTHER; note = 2'O-methyl guanosine phosphorothioate
  modified_base 141: mod_base = OTHER; note = adenosine phosphorothioate
  modified_base 142: mod_base = OTHER; note = 2'O-methyl guanosine phosphorothioate
  modified_base 143: mod_base = OTHER; note = 2'O-methyl cytidine phosphorothioate
  modified_base 144: mod_base = OTHER; note = 2'O-methyl adenosine
aaggctgtgctgaccatcgagtctttgtactctggtaccagaagctacaaagataaggcttcatgccgaaatcaacaccctgtcattttatggcagggtgttttgccccagcagcttcagtccctttctcgtcgatggtcagca

SEQ ID NO: 24357 - RNA, 143 nt, synthetic construct
  source 1..143: mol_type = other RNA
  modified_base 1: mod_base = OTHER; note = 2'O-methyl adenosine phosphorothioate
  modified_base 2: mod_base = OTHER; note = 2'O-methyl adenosine phosphorothioate
  modified_base 3: mod_base = OTHER; note = 2'O-methyl guanosine phosphorothioate
  modified_base 140: mod_base = OTHER; note = cytidine phosphorothioate
  modified_base 141: mod_base = OTHER; note = 2'O-methyl adenosine phosphorothioate
  modified_base 142: mod_base = OTHER; note = 2'O-methyl guanosine phosphorothioate
  modified_base 143: mod_base = OTHER; note = 2'O-methyl cytidine
aaggctgtgctgaccatcgagtctttgtactctggtaccagaagctacaaagataaggcttcatgccgaaatcaacaccctgtcattttatggcagggtgttttgccccagcagcttcagtccctttctcgtcgatggtcagc

SEQ ID NO: 24358 - RNA, 142 nt, synthetic construct
  source 1..142: mol_type = other RNA
  modified_base 1: mod_base = OTHER; note = 2'O-methyl adenosine phosphorothioate
  modified_base 2: mod_base = OTHER; note = 2'O-methyl adenosine phosphorothioate
  modified_base 3: mod_base = OTHER; note = 2'O-methyl guanosine phosphorothioate
  modified_base 139: mod_base = OTHER; note = uridine phosphorothioate
  modified_base 140: mod_base = OTHER; note = 2'O-methyl cytidine phosphorothioate
  modified_base 141: mod_base = OTHER; note = 2'O-methyl adenosine phosphorothioate
  modified_base 142: mod_base = OTHER; note = 2'O-methyl guanosine
aaggctgtgctgaccatcgagtctttgtactctggtaccagaagctacaaagataaggcttcatgccgaaatcaacaccctgtcattttatggcagggtgttttgccccagcagcttcagtccctttctcgtcgatggtcag

SEQ ID NO: 24359 - RNA, 146 nt, synthetic construct
  source 1..146: mol_type = other RNA
  modified_base 1: mod_base = OTHER; note = 2'O-methyl adenosine phosphorothioate
  modified_base 2: mod_base = OTHER; note = 2'O-methyl adenosine phosphorothioate
  modified_base 3: mod_base = OTHER; note = 2'O-methyl guanosine phosphorothioate
  modified_base 143: mod_base = OTHER; note = cytidine phosphorothioate
  modified_base 144: mod_base = OTHER; note = 2'O-methyl cytidine phosphorothioate
  modified_base 145: mod_base = OTHER; note = 2'O-methyl uridine phosphorothioate
  modified_base 146: mod_base = OTHER; note = 2'O-methyl uridine
aaggctgtgctgaccatcgagtctttgtactctggtaccagaagctacaaagataaggcttcatgccgaaatcaacaccctgtcattttatggcagggtgttttagcagcttcagtccctttctcgtcgatggtcagcacagcctt

SEQ ID NO: 24360 - RNA, 145 nt, synthetic construct
  source 1..145: mol_type = other RNA
  modified_base 1: mod_base = OTHER; note = 2'O-methyl adenosine phosphorothioate
  modified_base 2: mod_base = OTHER; note = 2'O-methyl adenosine phosphorothioate
  modified_base 3: mod_base = OTHER; note = 2'O-methyl guanosine phosphorothioate
  modified_base 142: mod_base = OTHER; note = guanosine phosphorothioate
  modified_base 143: mod_base = OTHER; note = 2'O-methyl cytidine phosphorothioate
  modified_base 144: mod_base = OTHER; note = 2'O-methyl cytidine phosphorothioate
  modified_base 145: mod_base = OTHER; note = 2'O-methyl uridine
aaggctgtgctgaccatcgagtctttgtactctggtaccagaagctacaaagataaggcttcatgccgaaatcaacaccctgtcattttatggcagggtgttttagcagcttcagtccctttctcgtcgatggtcagcacagcct

SEQ ID NO: 24361 - RNA, 144 nt, synthetic construct
  source 1..144: mol_type = other RNA
  modified_base 1: mod_base = OTHER; note = 2'O-methyl adenosine phosphorothioate
  modified_base 2: mod_base = OTHER; note = 2'O-methyl adenosine phosphorothioate
  modified_base 3: mod_base = OTHER; note = 2'O-methyl guanosine phosphorothioate
  modified_base 141: mod_base = OTHER; note = adenosine phosphorothioate
  modified_base 142: mod_base = OTHER; note = 2'O-methyl guanosine phosphorothioate
  modified_base 143: mod_base = OTHER; note = 2'O-methyl cytidine phosphorothioate
  modified_base 144: mod_base = OTHER; note = 2'O-methyl cytidine
aaggctgtgctgaccatcgagtctttgtactctggtaccagaagctacaaagataaggcttcatgccgaaatcaacaccctgtcattttatggcagggtgttttagcagcttcagtccctttctcgtcgatggtcagcacagcc

SEQ ID NO: 24362 - RNA, 143 nt, synthetic construct
  source 1..143: mol_type = other RNA
  modified_base 1: mod_base = OTHER; note = 2'O-methyl adenosine phosphorothioate
  modified_base 2: mod_base = OTHER; note = 2'O-methyl adenosine phosphorothioate
  modified_base 3: mod_base = OTHER; note = 2'O-methyl guanosine phosphorothioate
  modified_base 140: mod_base = OTHER; note = cytidine phosphorothioate
  modified_base 141: mod_base = OTHER; note = 2'O-methyl adenosine phosphorothioate
  modified_base 142: mod_base = OTHER; note = 2'O-methyl guanosine phosphorothioate
  modified_base 143: mod_base = OTHER; note = 2'O-methyl cytidine
aaggctgtgctgaccatcgagtctttgtactctggtaccagaagctacaaagataaggcttcatgccgaaatcaacaccctgtcattttatggcagggtgttttagcagcttcagtccctttctcgtcgatggtcagcacagc

SEQ ID NO: 24363 - RNA, 142 nt, synthetic construct
  source 1..142: mol_type = other RNA
  modified_base 1: mod_base = OTHER; note = 2'O-methyl adenosine phosphorothioate
  modified_base 2: mod_base = OTHER; note = 2'O-methyl adenosine phosphorothioate
  modified_base 3: mod_base = OTHER; note = 2'O-methyl guanosine phosphorothioate
  modified_base 139: mod_base = OTHER; note = adenosine phosphorothioate
  modified_base 140: mod_base = OTHER; note = 2'O-methyl cytidine phosphorothioate
  modified_base 141: mod_base = OTHER; note = 2'O-methyl adenosine phosphorothioate
  modified_base 142: mod_base = OTHER; note = 2'O-methyl guanosine
aaggctgtgctgaccatcgagtctttgtactctggtaccagaagctacaaagataaggcttcatgccgaaatcaacaccctgtcattttatggcagggtgttttagcagcttcagtccctttctcgtcgatggtcagcacag

SEQ ID NO: 24364 - RNA, 141 nt, synthetic construct
  source 1..141: mol_type = other RNA
  modified_base 1: mod_base = OTHER; note = 2'O-methyl adenosine phosphorothioate
  modified_base 2: mod_base = OTHER; note = 2'O-methyl adenosine phosphorothioate
  modified_base 3: mod_base = OTHER; note = 2'O-methyl guanosine phosphorothioate
  modified_base 138: mod_base = OTHER; note = cytidine phosphorothioate
  modified_base 139: mod_base = OTHER; note = 2'O-methyl adenosine phosphorothioate
  modified_base 140: mod_base = OTHER; note = 2'O-methyl cytidine phosphorothioate
  modified_base 141: mod_base = OTHER; note = 2'O-methyl adenosine
aaggctgtgctgaccatcgagtctttgtactctggtaccagaagctacaaagataaggcttcatgccgaaatcaacaccctgtcattttatggcagggtgttttagcagcttcagtccctttctcgtcgatggtcagcaca

SEQ ID NO: 24365 - RNA, 140 nt, synthetic construct
  source 1..140: mol_type = other RNA
  modified_base 1: mod_base = OTHER; note = 2'O-methyl adenosine phosphorothioate
  modified_base 2: mod_base = OTHER; note = 2'O-methyl adenosine phosphorothioate
  modified_base 3: mod_base = OTHER; note = 2'O-methyl guanosine phosphorothioate
  modified_base 137: mod_base = OTHER; note = guanosine phosphorothioate
  modified_base 138: mod_base = OTHER; note = 2'O-methyl cytidine phosphorothioate
  modified_base 139: mod_base = OTHER; note = 2'O-methyl adenosine phosphorothioate
  modified_base 140: mod_base = OTHER; note = 2'O-methyl cytidine
aaggctgtgctgaccatcgagtctttgtactctggtaccagaagctacaaagataaggcttcatgccgaaatcaacaccctgtcattttatggcagggtgttttagcagcttcagtccctttctcgtcgatggtcagcac

SEQ ID NO: 24366 - RNA, 139 nt, synthetic construct
  source 1..139: mol_type = other RNA
  modified_base 1: mod_base = OTHER; note = 2'O-methyl adenosine phosphorothioate
  modified_base 2: mod_base = OTHER; note = 2'O-methyl adenosine phosphorothioate
  modified_base 3: mod_base = OTHER; note = 2'O-methyl guanosine phosphorothioate
  modified_base 136: mod_base = OTHER; note = adenosine phosphorothioate
  modified_base 137: mod_base = OTHER; note = 2'O-methyl guanosine phosphorothioate
  modified_base 138: mod_base = OTHER; note = 2'O-methyl cytidine phosphorothioate
  modified_base 139: mod_base = OTHER; note = 2'O-methyl adenosine
aaggctgtgctgaccatcgagtctttgtactctggtaccagaagctacaaagataaggcttcatgccgaaatcaacaccctgtcattttatggcagggtgttttagcagcttcagtccctttctcgtcgatggtcagca

SEQ ID NO: 24367 - RNA, 138 nt, synthetic construct
  source 1..138: mol_type = other RNA
  modified_base 1: mod_base = OTHER; note = 2'O-methyl adenosine phosphorothioate
  modified_base 2: mod_base = OTHER; note = 2'O-methyl adenosine phosphorothioate
  modified_base 3: mod_base = OTHER; note = 2'O-methyl guanosine phosphorothioate
  modified_base 135: mod_base = OTHER; note = cytidine phosphorothioate
  modified_base 136: mod_base = OTHER; note = 2'O-methyl adenosine phosphorothioate
  modified_base 137: mod_base = OTHER; note = 2'O-methyl guanosine phosphorothioate
  modified_base 138: mod_base = OTHER; note = 2'O-methyl cytidine
aaggctgtgctgaccatcgagtctttgtactctggtaccagaagctacaaagataaggcttcatgccgaaatcaacaccctgtcattttatggcagggtgttttagcagcttcagtccctttctcgtcgatggtcagc

SEQ ID NO: 24368 - RNA, 137 nt, synthetic construct
  source 1..137: mol_type = other RNA
  modified_base 1: mod_base = OTHER; note = 2'O-methyl adenosine phosphorothioate
  modified_base 2: mod_base = OTHER; note = 2'O-methyl adenosine phosphorothioate
  modified_base 3: mod_base = OTHER; note = 2'O-methyl guanosine phosphorothioate
  modified_base 134: mod_base = OTHER; note = uridine phosphorothioate
  modified_base 135: mod_base = OTHER; note = 2'O-methyl cytidine phosphorothioate
  modified_base 136: mod_base = OTHER; note = 2'O-methyl adenosine phosphorothioate
  modified_base 137: mod_base = OTHER; note = 2'O-methyl guanosine
aaggctgtgctgaccatcgagtctttgtactctggtaccagaagctacaaagataaggcttcatgccgaaatcaacaccctgtcattttatggcagggtgttttagcagcttcagtccctttctcgtcgatggtcag

SEQ ID NO: 24369 - RNA, 140 nt, synthetic construct
  source 1..140: mol_type = other RNA
  modified_base 1: mod_base = OTHER; note = 2'O-methyl adenosine phosphorothioate
  modified_base 2: mod_base = OTHER; note = 2'O-methyl adenosine phosphorothioate
  modified_base 3: mod_base = OTHER; note = 2'O-methyl guanosine phosphorothioate
  modified_base 137: mod_base = OTHER; note = cytidine phosphorothioate
  modified_base 138: mod_base = OTHER; note = 2'O-methyl cytidine phosphorothioate
  modified_base 139: mod_base = OTHER; note = 2'O-methyl uridine phosphorothioate
  modified_base 140: mod_base = OTHER; note = 2'O-methyl uridine
aaggctgtgctgaccatcgagtctttgtactctggtaccagaagctacaaagataaggcttcatgccgaaatcaacaccctgtcattttatggcagggtgttttttcagtccctttctcgtcgatggtcagcacagcctt

SEQ ID NO: 24370 - RNA, 139 nt, synthetic construct
  source 1..139: mol_type = other RNA
  modified_base 1: mod_base = OTHER; note = 2'O-methyl adenosine phosphorothioate
  modified_base 2: mod_base = OTHER; note = 2'O-methyl adenosine phosphorothioate
  modified_base 3: mod_base = OTHER; note = 2'O-methyl guanosine phosphorothioate
  modified_base 136: mod_base = OTHER; note = guanosine phosphorothioate
  modified_base 137: mod_base = OTHER; note = 2'O-methyl cytidine phosphorothioate
  modified_base 138: mod_base = OTHER; note = 2'O-methyl cytidine phosphorothioate
  modified_base 139: mod_base = OTHER; note = 2'O-methyl uridine
aaggctgtgctgaccatcgagtctttgtactctggtaccagaagctacaaagataaggcttcatgccgaaatcaacaccctgtcattttatggcagggtgttttttcagtccctttctcgtcgatggtcagcacagcct

SEQ ID NO: 24371 - RNA, 138 nt, synthetic construct
  source 1..138: mol_type = other RNA
  modified_base 1: mod_base = OTHER; note = 2'O-methyl adenosine phosphorothioate
  modified_base 2: mod_base = OTHER; note = 2'O-methyl adenosine phosphorothioate
  modified_base 3: mod_base = OTHER; note = 2'O-methyl guanosine phosphorothioate
  modified_base 135: mod_base = OTHER; note = adenosine phosphorothioate
  modified_base 136: mod_base = OTHER; note = 2'O-methyl guanosine phosphorothioate
  modified_base 137: mod_base = OTHER; note = 2'O-methyl cytidine phosphorothioate
  modified_base 138: mod_base = OTHER; note = 2'O-methyl cytidine
aaggctgtgctgaccatcgagtctttgtactctggtaccagaagctacaaagataaggcttcatgccgaaatcaacaccctgtcattttatggcagggtgttttttcagtccctttctcgtcgatggtcagcacagcc

SEQ ID NO: 24372 - RNA, 137 nt, synthetic construct
  source 1..137: mol_type = other RNA
  modified_base 1: mod_base = OTHER; note = 2'O-methyl adenosine phosphorothioate
  modified_base 2: mod_base = OTHER; note = 2'O-methyl adenosine phosphorothioate
  modified_base 3: mod_base = OTHER; note = 2'O-methyl guanosine phosphorothioate
  modified_base 134: mod_base = OTHER; note = cytidine phosphorothioate
  modified_base 135: mod_base = OTHER; note = 2'O-methyl adenosine phosphorothioate
  modified_base 136: mod_base = OTHER; note = 2'O-methyl guanosine phosphorothioate
  modified_base 137: mod_base = OTHER; note = 2'O-methyl cytidine
aaggctgtgctgaccatcgagtctttgtactctggtaccagaagctacaaagataaggcttcatgccgaaatcaacaccctgtcattttatggcagggtgttttttcagtccctttctcgtcgatggtcagcacagc

SEQ ID NO: 24373 - RNA, 136 nt, synthetic construct
  source 1..136: mol_type = other RNA
  modified_base 1: mod_base = OTHER; note = 2'O-methyl adenosine phosphorothioate
  modified_base 2: mod_base = OTHER; note = 2'O-methyl adenosine phosphorothioate
  modified_base 3: mod_base = OTHER; note = 2'O-methyl guanosine phosphorothioate
  modified_base 133: mod_base = OTHER; note = adenosine phosphorothioate
  modified_base 134: mod_base = OTHER; note = 2'O-methyl cytidine phosphorothioate
  modified_base 135: mod_base = OTHER; note = 2'O-methyl adenosine phosphorothioate
  modified_base 136: mod_base = OTHER; note = 2'O-methyl guanosine
aaggctgtgctgaccatcgagtctttgtactctggtaccagaagctacaaagataaggcttcatgccgaaatcaacaccctgtcattttatggcagggtgttttttcagtccctttctcgtcgatggtcagcacag

SEQ ID NO: 24374 - RNA, 135 nt, synthetic construct
  source 1..135: mol_type = other RNA
  modified_base 1: mod_base = OTHER; note = 2'O-methyl adenosine phosphorothioate
  modified_base 2: mod_base = OTHER; note = 2'O-methyl adenosine phosphorothioate
  modified_base 3: mod_base = OTHER; note = 2'O-methyl guanosine phosphorothioate
  modified_base 132: mod_base = OTHER; note = cytidine phosphorothioate
  modified_base 133: mod_base = OTHER; note = 2'O-methyl adenosine phosphorothioate
  modified_base 134: mod_base = OTHER; note = 2'O-methyl cytidine phosphorothioate
  modified_base 135: mod_base = OTHER; note = 2'O-methyl adenosine
aaggctgtgctgaccatcgagtctttgtactctggtaccagaagctacaaagataaggcttcatgccgaaatcaacaccctgtcattttatggcagggtgttttttcagtccctttctcgtcgatggtcagcaca

SEQ ID NO: 24375 - RNA, 134 nt, synthetic construct
  source 1..134: mol_type = other RNA
  modified_base 1: mod_base = OTHER; note = 2'O-methyl adenosine phosphorothioate
  modified_base 2: mod_base = OTHER; note = 2'O-methyl adenosine phosphorothioate
  modified_base 3: mod_base = OTHER; note = 2'O-methyl guanosine phosphorothioate
  modified_base 131: mod_base = OTHER; note = guanosine phosphorothioate
  modified_base 132: mod_base = OTHER; note = 2'O-methyl cytidine phosphorothioate
  modified_base 133: mod_base = OTHER; note = 2'O-methyl adenosine phosphorothioate
  modified_base 134: mod_base = OTHER; note = 2'O-methyl cytidine
aaggctgtgctgaccatcgagtctttgtactctggtaccagaagctacaaagataaggcttcatgccgaaatcaacaccctgtcattttatggcagggtgttttttcagtccctttctcgtcgatggtcagcac

SEQ ID NO: 24376 - RNA, 133 nt, synthetic construct
  source 1..133: mol_type = other RNA
  modified_base 1: mod_base = OTHER; note = 2'O-methyl adenosine phosphorothioate
  modified_base 2: mod_base = OTHER; note = 2'O-methyl adenosine phosphorothioate
  modified_base 3: mod_base = OTHER; note = 2'O-methyl guanosine phosphorothioate
  modified_base 130: mod_base = OTHER; note = adenosine phosphorothioate
  modified_base 131: mod_base = OTHER; note = 2'O-methyl guanosine phosphorothioate
  modified_base 132: mod_base = OTHER; note = 2'O-methyl cytidine phosphorothioate
  modified_base 133: mod_base = OTHER; note = 2'O-methyl adenosine
aaggctgtgctgaccatcgagtctttgtactctggtaccagaagctacaaagataaggcttcatgccgaaatcaacaccctgtcattttatggcagggtgttttttcagtccctttctcgtcgatggtcagca

SEQ ID NO: 24377 - RNA, 132 nt, synthetic construct
  source 1..132: mol_type = other RNA
  modified_base 1: mod_base = OTHER; note = 2'O-methyl adenosine phosphorothioate
  modified_base 2: mod_base = OTHER; note = 2'O-methyl adenosine phosphorothioate
  modified_base 3: mod_base = OTHER; note = 2'O-methyl guanosine phosphorothioate
  modified_base 129: mod_base = OTHER; note = cytidine phosphorothioate
  modified_base 130: mod_base = OTHER; note = 2'O-methyl adenosine phosphorothioate
  modified_base 131: mod_base = OTHER; note = 2'O-methyl guanosine phosphorothioate
  modified_base 132: mod_base = OTHER; note = 2'O-methyl cytidine
aaggctgtgctgaccatcgagtctttgtactctggtaccagaagctacaaagataaggcttcatgccgaaatcaacaccctgtcattttatggcagggtgttttttcagtccctttctcgtcgatggtcagc

SEQ ID NO: 24378 - RNA, 131 nt, synthetic construct
  source 1..131: mol_type = other RNA
  modified_base 1: mod_base = OTHER; note = 2'O-methyl adenosine phosphorothioate
  modified_base 2: mod_base = OTHER; note = 2'O-methyl adenosine phosphorothioate
  modified_base 3: mod_base = OTHER; note = 2'O-methyl guanosine phosphorothioate
  modified_base 128: mod_base = OTHER; note = uridine phosphorothioate
  modified_base 129: mod_base = OTHER; note = 2'O-methyl cytidine phosphorothioate
  modified_base 130: mod_base = OTHER; note = 2'O-methyl adenosine phosphorothioate
  modified_base 131: mod_base = OTHER; note = 2'O-methyl guanosine
aaggctgtgctgaccatcgagtctttgtactctggtaccagaagctacaaagataaggcttcatgccgaaatcaacaccctgtcattttatggcagggtgttttttcagtccctttctcgtcgatggtcag

SEQ ID NO: 24379 - RNA, 137 nt, synthetic construct
  source 1..137: mol_type = other RNA
  modified_base 1: mod_base = OTHER; note = 2'O-methyl adenosine phosphorothioate
  modified_base 2: mod_base = OTHER; note = 2'O-methyl adenosine phosphorothioate
  modified_base 3: mod_base = OTHER; note = 2'O-methyl guanosine phosphorothioate
  modified_base 134: mod_base = OTHER; note = cytidine phosphorothioate
  modified_base 135: mod_base = OTHER; note = 2'O-methyl cytidine phosphorothioate
  modified_base 136: mod_base = OTHER; note = 2'O-methyl uridine phosphorothioate
  modified_base 137: mod_base = OTHER; note = 2'O-methyl uridine
aaggctgtgctgaccatcgagtctttgtactctggtaccagaagctacaaagataaggcttcatgccgaaatcaacaccctgtcattttatggcagggtgttttagtccctttctcgtcgatggtcagcacagcctt

SEQ ID NO: 24380 - RNA, 136 nt, synthetic construct
  source 1..136: mol_type = other RNA
  modified_base 1: mod_base = OTHER; note = 2'O-methyl adenosine phosphorothioate
  modified_base 2: mod_base = OTHER; note = 2'O-methyl adenosine phosphorothioate
  modified_base 3: mod_base = OTHER; note = 2'O-methyl guanosine phosphorothioate
  modified_base 133: mod_base = OTHER; note = guanosine phosphorothioate
  modified_base 134: mod_base = OTHER; note = 2'O-methyl cytidine phosphorothioate
  modified_base 135: mod_base = OTHER; note = 2'O-methyl cytidine phosphorothioate
  modified_base 136: mod_base = OTHER; note = 2'O-methyl uridine
aaggctgtgctgaccatcgagtctttgtactctggtaccagaagctacaaagataaggcttcatgccgaaatcaacaccctgtcattttatggcagggtgttttagtccctttctcgtcgatggtcagcacagcct

SEQ ID NO: 24381 - RNA, 135 nt, synthetic construct
  source 1..135: mol_type = other RNA
  modified_base 1: mod_base = OTHER; note = 2'O-methyl adenosine phosphorothioate
  modified_base 2: mod_base = OTHER; note = 2'O-methyl adenosine phosphorothioate
  modified_base 3: mod_base = OTHER; note = 2'O-methyl guanosine phosphorothioate
  modified_base 132: mod_base = OTHER; note = adenosine phosphorothioate
  modified_base 133: mod_base = OTHER; note = 2'O-methyl guanosine phosphorothioate
  modified_base 134: mod_base = OTHER; note = 2'O-methyl cytidine phosphorothioate
  modified_base 135: mod_base = OTHER; note = 2'O-methyl cytidine
aaggctgtgctgaccatcgagtctttgtactctggtaccagaagctacaaagataaggcttcatgccgaaatcaacaccctgtcattttatggcagggtgttttagtccctttctcgtcgatggtcagcacagcc

SEQ ID NO: 24382 - RNA, 134 nt, synthetic construct
  source 1..134: mol_type = other RNA
  modified_base 1: mod_base = OTHER; note = 2'O-methyl adenosine phosphorothioate
  modified_base 2: mod_base = OTHER; note = 2'O-methyl adenosine phosphorothioate
  modified_base 3: mod_base = OTHER; note = 2'O-methyl guanosine phosphorothioate
  modified_base 131: mod_base = OTHER; note = cytidine phosphorothioate
  modified_base 132: mod_base = OTHER; note = 2'O-methyl adenosine phosphorothioate
  modified_base 133: mod_base = OTHER; note = 2'O-methyl guanosine phosphorothioate
  modified_base 134: mod_base = OTHER; note = 2'O-methyl cytidine
aaggctgtgctgaccatcgagtctttgtactctggtaccagaagctacaaagataaggcttcatgccgaaatcaacaccctgtcattttatggcagggtgttttagtccctttctcgtcgatggtcagcacagc

SEQ ID NO: 24383 - RNA, 133 nt, synthetic construct
  source 1..133: mol_type = other RNA
  modified_base 1: mod_base = OTHER; note = 2'O-methyl adenosine phosphorothioate
  modified_base 2: mod_base = OTHER; note = 2'O-methyl adenosine phosphorothioate
  modified_base 3: mod_base = OTHER; note = 2'O-methyl guanosine phosphorothioate
  modified_base 130: mod_base = OTHER; note = adenosine phosphorothioate
  modified_base 131: mod_base = OTHER; note = 2'O-methyl cytidine phosphorothioate
  modified_base 132: mod_base = OTHER; note = 2'O-methyl adenosine phosphorothioate
  modified_base 133: mod_base = OTHER; note = 2'O-methyl guanosine
aaggctgtgctgaccatcgagtctttgtactctggtaccagaagctacaaagataaggcttcatgccgaaatcaacaccctgtcattttatggcagggtgttttagtccctttctcgtcgatggtcagcacag

SEQ ID NO: 24384 - RNA, 132 nt, synthetic construct
  source 1..132: mol_type = other RNA
  modified_base 1: mod_base = OTHER; note = 2'O-methyl adenosine phosphorothioate
  modified_base 2: mod_base = OTHER; note = 2'O-methyl adenosine phosphorothioate
  modified_base 3: mod_base = OTHER; note = 2'O-methyl guanosine phosphorothioate
  modified_base 129: mod_base = OTHER; note = cytidine phosphorothioate
  modified_base 130: mod_base = OTHER; note = 2'O-methyl adenosine phosphorothioate
  modified_base 131: mod_base = OTHER; note = 2'O-methyl cytidine phosphorothioate
  modified_base 132: mod_base = OTHER; note = 2'O-methyl adenosine
aaggctgtgctgaccatcgagtctttgtactctggtaccagaagctacaaagataaggcttcatgccgaaatcaacaccctgtcattttatggcagggtgttttagtccctttctcgtcgatggtcagcaca

SEQ ID NO: 24385 - RNA, 131 nt, synthetic construct
  source 1..131: mol_type = other RNA
  modified_base 1: mod_base = OTHER; note = 2'O-methyl adenosine phosphorothioate
  modified_base 2: mod_base = OTHER; note = 2'O-methyl adenosine phosphorothioate
  modified_base 3: mod_base = OTHER; note = 2'O-methyl guanosine phosphorothioate
  modified_base 128: mod_base = OTHER; note = guanosine phosphorothioate
  modified_base 129: mod_base = OTHER; note = 2'O-methyl cytidine phosphorothioate
  modified_base 130: mod_base = OTHER; note = 2'O-methyl adenosine phosphorothioate
  modified_base 131: mod_base = OTHER; note = 2'O-methyl cytidine
aaggctgtgctgaccatcgagtctttgtactctggtaccagaagctacaaagataaggcttcatgccgaaatcaacaccctgtcattttatggcagggtgttttagtccctttctcgtcgatggtcagcac

SEQ ID NO: 24386 - RNA, 130 nt, synthetic construct
  source 1..130: mol_type = other RNA
  modified_base 1: mod_base = OTHER; note = 2'O-methyl adenosine phosphorothioate
  modified_base 2: mod_base = OTHER; note = 2'O-methyl adenosine phosphorothioate
  modified_base 3: mod_base = OTHER; note = 2'O-methyl guanosine phosphorothioate
  modified_base 127: mod_base = OTHER; note = adenosine phosphorothioate
  modified_base 128: mod_base = OTHER; note = 2'O-methyl guanosine phosphorothioate
  modified_base 129: mod_base = OTHER; note = 2'O-methyl cytidine phosphorothioate
  modified_base 130: mod_base = OTHER; note = 2'O-methyl adenosine
aaggctgtgctgaccatcgagtctttgtactctggtaccagaagctacaaagataaggcttcatgccgaaatcaacaccctgtcattttatggcagggtgttttagtccctttctcgtcgatggtcagca

SEQ ID NO: 24387 - RNA, 129 nt, synthetic construct
  source 1..129: mol_type = other RNA
  modified_base 1: mod_base = OTHER; note = 2'O-methyl adenosine phosphorothioate
  modified_base 2: mod_base = OTHER; note = 2'O-methyl adenosine phosphorothioate
  modified_base 3: mod_base = OTHER; note = 2'O-methyl guanosine phosphorothioate
  modified_base 126: mod_base = OTHER; note = cytidine phosphorothioate
  modified_base 127: mod_base = OTHER; note = 2'O-methyl adenosine phosphorothioate
  modified_base 128: mod_base = OTHER; note = 2'O-methyl guanosine phosphorothioate
  modified_base 129: mod_base = OTHER; note = 2'O-methyl cytidine
aaggctgtgctgaccatcgagtctttgtactctggtaccagaagctacaaagataaggcttcatgccgaaatcaacaccctgtcattttatggcagggtgttttagtccctttctcgtcgatggtcagc

SEQ ID NO: 24388 - RNA, 128 nt, synthetic construct
  source 1..128: mol_type = other RNA
  modified_base 1: mod_base = OTHER; note = 2'O-methyl adenosine phosphorothioate
  modified_base 2: mod_base = OTHER; note = 2'O-methyl adenosine phosphorothioate
  modified_base 3: mod_base = OTHER; note = 2'O-methyl guanosine phosphorothioate
  modified_base 125: mod_base = OTHER; note = uridine phosphorothioate
  modified_base 126: mod_base = OTHER; note = 2'O-methyl cytidine phosphorothioate
  modified_base 127: mod_base = OTHER; note = 2'O-methyl adenosine phosphorothioate
  modified_base 128: mod_base = OTHER; note = 2'O-methyl guanosine
aaggctgtgctgaccatcgagtctttgtactctggtaccagaagctacaaagataaggcttcatgccgaaatcaacaccctgtcattttatggcagggtgttttagtccctttctcgtcgatggtcag

SEQ ID NO: 24389 - RNA, 135 nt, synthetic construct
  source 1..135: mol_type = other RNA
  modified_base 1: mod_base = OTHER; note = 2'O-methyl adenosine phosphorothioate
  modified_base 2: mod_base = OTHER; note = 2'O-methyl adenosine phosphorothioate
  modified_base 3: mod_base = OTHER; note = 2'O-methyl guanosine phosphorothioate
  modified_base 132: mod_base = OTHER; note = cytidine phosphorothioate
  modified_base 133: mod_base = OTHER; note = 2'O-methyl cytidine phosphorothioate
  modified_base 134: mod_base = OTHER; note = 2'O-methyl uridine phosphorothioate
  modified_base 135: mod_base = OTHER; note = 2'O-methyl uridine
aaggctgtgctgaccatcgagtctttgtactctggtaccagaagctacaaagataaggcttcatgccgaaatcaacaccctgtcattttatggcagggtgtttttccctttctcgtcgatggtcagcacagcctt

SEQ ID NO: 24390 - RNA, 134 nt, synthetic construct
  source 1..134: mol_type = other RNA
  modified_base 1: mod_base = OTHER; note = 2'O-methyl adenosine phosphorothioate
  modified_base 2: mod_base = OTHER; note = 2'O-methyl adenosine phosphorothioate
  modified_base 3: mod_base = OTHER; note = 2'O-methyl guanosine phosphorothioate
  modified_base 131: mod_base = OTHER; note = guanosine phosphorothioate
  modified_base 132: mod_base = OTHER; note = 2'O-methyl cytidine phosphorothioate
  modified_base 133: mod_base = OTHER; note = 2'O-methyl cytidine phosphorothioate
  modified_base 134: mod_base = OTHER; note = 2'O-methyl uridine
aaggctgtgctgaccatcgagtctttgtactctggtaccagaagctacaaagataaggcttcatgccgaaatcaacaccctgtcattttatggcagggtgtttttccctttctcgtcgatggtcagcacagcct

SEQ ID NO: 24391 - RNA, 133 nt, synthetic construct
  source 1..133: mol_type = other RNA
  modified_base 1: mod_base = OTHER; note = 2'O-methyl adenosine phosphorothioate
  modified_base 2: mod_base = OTHER; note = 2'O-methyl adenosine phosphorothioate
  modified_base 3: mod_base = OTHER; note = 2'O-methyl guanosine phosphorothioate
  modified_base 130: mod_base = OTHER; note = adenosine phosphorothioate
  modified_base 131: mod_base = OTHER; note = 2'O-methyl guanosine phosphorothioate
  modified_base 132: mod_base = OTHER; note = 2'O-methyl cytidine phosphorothioate
  modified_base 133: mod_base = OTHER; note = 2'O-methyl cytidine
aaggctgtgctgaccatcgagtctttgtactctggtaccagaagctacaaagataaggcttcatgccgaaatcaacaccctgtcattttatggcagggtgtttttccctttctcgtcgatggtcagcacagcc

SEQ ID NO: 24392 - RNA, 132 nt, synthetic construct
  source 1..132: mol_type = other RNA
  modified_base 1: mod_base = OTHER; note = 2'O-methyl adenosine phosphorothioate
  modified_base 2: mod_base = OTHER; note = 2'O-methyl adenosine phosphorothioate
  modified_base 3: mod_base = OTHER; note = 2'O-methyl guanosine phosphorothioate
  modified_base 129: mod_base = OTHER; note = cytidine phosphorothioate
  modified_base 130: mod_base = OTHER; note = 2'O-methyl adenosine phosphorothioate
  modified_base 131: mod_base = OTHER; note = 2'O-methyl guanosine phosphorothioate
  modified_base 132: mod_base = OTHER; note = 2'O-methyl cytidine
aaggctgtgctgaccatcgagtctttgtactctggtaccagaagctacaaagataaggcttcatgccgaaatcaacaccctgtcattttatggcagggtgtttttccctttctcgtcgatggtcagcacagc

SEQ ID NO: 24393 - RNA, 131 nt, synthetic construct
  source 1..131: mol_type = other RNA
  modified_base 1: mod_base = OTHER; note = 2'O-methyl adenosine phosphorothioate
  modified_base 2: mod_base = OTHER; note = 2'O-methyl adenosine phosphorothioate
  modified_base 3: mod_base = OTHER; note = 2'O-methyl guanosine phosphorothioate
  modified_base 128: mod_base = OTHER; note = adenosine phosphorothioate
  modified_base 129: mod_base = OTHER; note = 2'O-methyl cytidine phosphorothioate
  modified_base 130: mod_base = OTHER; note = 2'O-methyl adenosine phosphorothioate
  modified_base 131: mod_base = OTHER; note = 2'O-methyl guanosine
aaggctgtgctgaccatcgagtctttgtactctggtaccagaagctacaaagataaggcttcatgccgaaatcaacaccctgtcattttatggcagggtgtttttccctttctcgtcgatggtcagcacag

SEQ ID NO: 24394 - RNA, 130 nt, synthetic construct
  source 1..130: mol_type = other RNA
  modified_base 1: mod_base = OTHER; note = 2'O-methyl adenosine phosphorothioate
  modified_base 2: mod_base = OTHER; note = 2'O-methyl adenosine phosphorothioate
  modified_base 3: mod_base = OTHER; note = 2'O-methyl guanosine phosphorothioate
  modified_base 127: mod_base = OTHER; note = cytidine phosphorothioate
  modified_base 128: mod_base = OTHER; note = 2'O-methyl adenosine phosphorothioate
  modified_base 129: mod_base = OTHER; note = 2'O-methyl cytidine phosphorothioate
  modified_base 130: mod_base = OTHER; note = 2'O-methyl adenosine
aaggctgtgctgaccatcgagtctttgtactctggtaccagaagctacaaagataaggcttcatgccgaaatcaacaccctgtcattttatggcagggtgtttttccctttctcgtcgatggtcagcaca

SEQ ID NO: 24395 - RNA, 129 nt, synthetic construct
  source 1..129: mol_type = other RNA
  modified_base 1: mod_base = OTHER; note = 2'O-methyl adenosine phosphorothioate
  modified_base 2: mod_base = OTHER; note = 2'O-methyl adenosine phosphorothioate
  modified_base 3: mod_base = OTHER; note = 2'O-methyl guanosine phosphorothioate
  modified_base 126: mod_base = OTHER; note = guanosine phosphorothioate
  modified_base 127: mod_base = OTHER; note = 2'O-methyl cytidine phosphorothioate
  modified_base 128: mod_base = OTHER; note = 2'O-methyl adenosine phosphorothioate
  modified_base 129: mod_base = OTHER; note = 2'O-methyl cytidine
aaggctgtgctgaccatcgagtctttgtactctggtaccagaagctacaaagataaggcttcatgccgaaatcaacaccctgtcattttatggcagggtgtttttccctttctcgtcgatggtcagcac

SEQ ID NO: 24396 - RNA, 128 nt, synthetic construct
  source 1..128: mol_type = other RNA
  modified_base 1: mod_base = OTHER; note = 2'O-methyl adenosine phosphorothioate
  modified_base 2: mod_base = OTHER; note = 2'O-methyl adenosine phosphorothioate
  modified_base 3: mod_base = OTHER; note = 2'O-methyl guanosine phosphorothioate
  modified_base 125: mod_base = OTHER; note = adenosine phosphorothioate
  modified_base 126: mod_base = OTHER; note = 2'O-methyl guanosine phosphorothioate
  modified_base 127: mod_base = OTHER; note = 2'O-methyl cytidine phosphorothioate
  modified_base 128: mod_base = OTHER; note = 2'O-methyl adenosine
aaggctgtgctgaccatcgagtctttgtactctggtaccagaagctacaaagataaggcttcatgccgaaatcaacaccctgtcattttatggcagggtgtttttccctttctcgtcgatggtcagca

SEQ ID NO: 24397 - RNA, 127 nt, synthetic construct
  source 1..127: mol_type = other RNA
  modified_base 1: mod_base = OTHER; note = 2'O-methyl adenosine phosphorothioate
  modified_base 2: mod_base = OTHER; note = 2'O-methyl adenosine phosphorothioate
  modified_base 3: mod_base = OTHER; note = 2'O-methyl guanosine phosphorothioate
  modified_base 124: mod_base = OTHER; note = cytidine phosphorothioate
  modified_base 125: mod_base = OTHER; note = 2'O-methyl adenosine phosphorothioate
  modified_base 126: mod_base = OTHER; note = 2'O-methyl guanosine phosphorothioate
  modified_base 127: mod_base = OTHER; note = 2'O-methyl cytidine
aaggctgtgctgaccatcgagtctttgtactctggtaccagaagctacaaagataaggcttcatgccgaaatcaacaccctgtcattttatggcagggtgtttttccctttctcgtcgatggtcagc

SEQ ID NO: 24398 - RNA, 126 nt, synthetic construct
  source 1..126: mol_type = other RNA
  modified_base 1: mod_base = OTHER; note = 2'O-methyl adenosine phosphorothioate
  modified_base 2: mod_base = OTHER; note = 2'O-methyl adenosine phosphorothioate
  modified_base 3: mod_base = OTHER; note = 2'O-methyl guanosine phosphorothioate
  modified_base 123: mod_base = OTHER; note = uridine phosphorothioate
  modified_base 124: mod_base = OTHER; note = 2'O-methyl cytidine phosphorothioate
  modified_base 125: mod_base = OTHER; note = 2'O-methyl adenosine phosphorothioate
  modified_base 126: mod_base = OTHER; note = 2'O-methyl guanosine
aaggctgtgctgaccatcgagtctttgtactctggtaccagaagctacaaagataaggcttcatgccgaaatcaacaccctgtcattttatggcagggtgtttttccctttctcgtcgatggtcag

SEQ ID NO: 24399 - RNA, 133 nt, synthetic construct
  source 1..133: mol_type = other RNA
  modified_base 1: mod_base = OTHER; note = 2'O-methyl adenosine phosphorothioate
  modified_base 2: mod_base = OTHER; note = 2'O-methyl adenosine phosphorothioate
  modified_base 3: mod_base = OTHER; note = 2'O-methyl guanosine phosphorothioate
  modified_base 130: mod_base = OTHER; note = cytidine phosphorothioate
  modified_base 131: mod_base = OTHER; note = 2'O-methyl cytidine phosphorothioate
  modified_base 132: mod_base = OTHER; note = 2'O-methyl uridine phosphorothioate
  modified_base 133: mod_base = OTHER; note = 2'O-methyl uridine
aaggctgtgctgaccatcgagtctttgtactctggtaccagaagctacaaagataaggcttcatgccgaaatcaacaccctgtcattttatggcagggtgttttcctttctcgtcgatggtcagcacagcctt

SEQ ID NO: 24400 - RNA, 132 nt, synthetic construct
  source 1..132: mol_type = other RNA
  modified_base 1: mod_base = OTHER; note = 2'O-methyl adenosine phosphorothioate
  modified_base 2: mod_base = OTHER; note = 2'O-methyl adenosine phosphorothioate
  modified_base 3: mod_base = OTHER; note = 2'O-methyl guanosine phosphorothioate
  modified_base 129: mod_base = OTHER; note = guanosine phosphorothioate
  modified_base 130: mod_base = OTHER; note = 2'O-methyl cytidine phosphorothioate
  modified_base 131: mod_base = OTHER; note = 2'O-methyl cytidine phosphorothioate
  modified_base 132: mod_base = OTHER; note = 2'O-methyl uridine
aaggctgtgctgaccatcgagtctttgtactctggtaccagaagctacaaagataaggcttcatgccgaaatcaacaccctgtcattttatggcagggtgttttcctttctcgtcgatggtcagcacagcct

SEQ ID NO: 24401 - RNA, 131 nt, synthetic construct
  source 1..131: mol_type = other RNA
  modified_base 1: mod_base = OTHER; note = 2'O-methyl adenosine phosphorothioate
  modified_base 2: mod_base = OTHER; note = 2'O-methyl adenosine phosphorothioate
  modified_base 3: mod_base = OTHER; note = 2'O-methyl guanosine phosphorothioate
  modified_base 128: mod_base = OTHER; note = adenosine phosphorothioate
  modified_base 129: mod_base = OTHER; note = 2'O-methyl guanosine phosphorothioate
  modified_base 130: mod_base = OTHER; note = 2'O-methyl cytidine phosphorothioate
  modified_base 131: mod_base = OTHER; note = 2'O-methyl cytidine
aaggctgtgctgaccatcgagtctttgtactctggtaccagaagctacaaagataaggcttcatgccgaaatcaacaccctgtcattttatggcagggtgttttcctttctcgtcgatggtcagcacagcc

SEQ ID NO: 24402 - RNA, 130 nt, synthetic construct
  source 1..130: mol_type = other RNA
  modified_base 1: mod_base = OTHER; note = 2'O-methyl adenosine phosphorothioate
  modified_base 2: mod_base = OTHER; note = 2'O-methyl adenosine phosphorothioate
  modified_base 3: mod_base = OTHER; note = 2'O-methyl guanosine phosphorothioate
  modified_base 127: mod_base = OTHER; note = cytidine phosphorothioate
  modified_base 128: mod_base = OTHER; note = 2'O-methyl adenosine phosphorothioate
  modified_base 129: mod_base = OTHER; note = 2'O-methyl guanosine phosphorothioate
  modified_base 130: mod_base = OTHER; note = 2'O-methyl cytidine
aaggctgtgctgaccatcgagtctttgtactctggtaccagaagctacaaagataaggcttcatgccgaaatcaacaccctgtcattttatggcagggtgttttcctttctcgtcgatggtcagcacagc

SEQ ID NO: 24403 - RNA, 129 nt, synthetic construct
  source 1..129: mol_type = other RNA
  modified_base 1: mod_base = OTHER; note = 2'O-methyl adenosine phosphorothioate
  modified_base 2: mod_base = OTHER; note = 2'O-methyl adenosine phosphorothioate
  modified_base 3: mod_base = OTHER; note = 2'O-methyl guanosine phosphorothioate
  modified_base 126: mod_base = OTHER; note = adenosine phosphorothioate
  modified_base 127: mod_base = OTHER; note = 2'O-methyl cytidine phosphorothioate
  modified_base 128: mod_base = OTHER; note = 2'O-methyl adenosine phosphorothioate
  modified_base 129: mod_base = OTHER; note = 2'O-methyl guanosine
aaggctgtgctgaccatcgagtctttgtactctggtaccagaagctacaaagataaggcttcatgccgaaatcaacaccctgtcattttatggcagggtgttttcctttctcgtcgatggtcagcacag

SEQ ID NO: 24404 - RNA, 128 nt, synthetic construct
  source 1..128: mol_type = other RNA
  modified_base 1: mod_base = OTHER; note = 2'O-methyl adenosine phosphorothioate
  modified_base 2: mod_base = OTHER; note = 2'O-methyl adenosine phosphorothioate
  modified_base 3: mod_base = OTHER; note = 2'O-methyl guanosine phosphorothioate
  modified_base 125: mod_base = OTHER; note = cytidine phosphorothioate
  modified_base 126: mod_base = OTHER; note = 2'O-methyl adenosine phosphorothioate
  modified_base 127: mod_base = OTHER; note = 2'O-methyl cytidine phosphorothioate
  modified_base 128: mod_base = OTHER; note = 2'O-methyl adenosine
aaggctgtgctgaccatcgagtctttgtactctggtaccagaagctacaaagataaggcttcatgccgaaatcaacaccctgtcattttatggcagggtgttttcctttctcgtcgatggtcagcaca

SEQ ID NO: 24405 - RNA, 127 nt, synthetic construct
  source 1..127: mol_type = other RNA
  modified_base 1: mod_base = OTHER; note = 2'O-methyl adenosine phosphorothioate
  modified_base 2: mod_base = OTHER; note = 2'O-methyl adenosine phosphorothioate
  modified_base 3: mod_base = OTHER; note = 2'O-methyl guanosine phosphorothioate
  modified_base 124: mod_base = OTHER; note = guanosine phosphorothioate
  modified_base 125: mod_base = OTHER; note = 2'O-methyl cytidine phosphorothioate
  modified_base 126: mod_base = OTHER; note = 2'O-methyl adenosine phosphorothioate
  modified_base 127: mod_base = OTHER; note = 2'O-methyl cytidine
aaggctgtgctgaccatcgagtctttgtactctggtaccagaagctacaaagataaggcttcatgccgaaatcaacaccctgtcattttatggcagggtgttttcctttctcgtcgatggtcagcac

SEQ ID NO: 24406 - RNA, 126 nt, synthetic construct
  source 1..126: mol_type = other RNA
  modified_base 1: mod_base = OTHER; note = 2'O-methyl adenosine phosphorothioate
  modified_base 2: mod_base = OTHER; note = 2'O-methyl adenosine phosphorothioate
  modified_base 3: mod_base = OTHER; note = 2'O-methyl guanosine phosphorothioate
  modified_base 123: mod_base = OTHER; note = adenosine phosphorothioate
  modified_base 124: mod_base = OTHER; note = 2'O-methyl guanosine phosphorothioate
  modified_base 125: mod_base = OTHER; note = 2'O-methyl cytidine phosphorothioate
  modified_base 126: mod_base = OTHER; note = 2'O-methyl adenosine
aaggctgtgctgaccatcgagtctttgtactctggtaccagaagctacaaagataaggcttcatgccgaaatcaacaccctgtcattttatggcagggtgttttcctttctcgtcgatggtcagca

SEQ ID NO: 24407 - RNA, 125 nt, synthetic construct
  source 1..125: mol_type = other RNA
  modified_base 1: mod_base = OTHER; note = 2'O-methyl adenosine phosphorothioate
  modified_base 2: mod_base = OTHER; note = 2'O-methyl adenosine phosphorothioate
  modified_base 3: mod_base = OTHER; note = 2'O-methyl guanosine phosphorothioate
  modified_base 122: mod_base = OTHER; note = cytidine phosphorothioate
  modified_base 123: mod_base = OTHER; note = 2'O-methyl adenosine phosphorothioate
  modified_base 124: mod_base = OTHER; note = 2'O-methyl guanosine phosphorothioate
  modified_base 125: mod_base = OTHER; note = 2'O-methyl cytidine
aaggctgtgctgaccatcgagtctttgtactctggtaccagaagctacaaagataaggcttcatgccgaaatcaacaccctgtcattttatggcagggtgttttcctttctcgtcgatggtcagc

SEQ ID NO: 24408 - RNA, 124 nt, synthetic construct
  source 1..124: mol_type = other RNA
  modified_base 1: mod_base = OTHER; note = 2'O-methyl adenosine phosphorothioate
  modified_base 2: mod_base = OTHER; note = 2'O-methyl adenosine phosphorothioate
  modified_base 3: mod_base = OTHER; note = 2'O-methyl guanosine phosphorothioate
  modified_base 121: mod_base = OTHER; note = uridine phosphorothioate
  modified_base 122: mod_base = OTHER; note = 2'O-methyl cytidine phosphorothioate
  modified_base 123: mod_base = OTHER; note = 2'O-methyl adenosine phosphorothioate
  modified_base 124: mod_base = OTHER; note = 2'O-methyl guanosine
aaggctgtgctgaccatcgagtctttgtactctggtaccagaagctacaaagataaggcttcatgccgaaatcaacaccctgtcattttatggcagggtgttttcctttctcgtcgatggtcag

SEQ ID NO: 24409 - RNA, 131 nt, synthetic construct
  source 1..131: mol_type = other RNA
  modified_base 1: mod_base = OTHER; note = 2'O-methyl adenosine phosphorothioate
  modified_base 2: mod_base = OTHER; note = 2'O-methyl adenosine phosphorothioate
  modified_base 3: mod_base = OTHER; note = 2'O-methyl guanosine phosphorothioate
  modified_base 128: mod_base = OTHER; note = cytidine phosphorothioate
  modified_base 129: mod_base = OTHER; note = 2'O-methyl cytidine phosphorothioate
  modified_base 130: mod_base = OTHER; note = 2'O-methyl uridine phosphorothioate
  modified_base 131: mod_base = OTHER; note = 2'O-methyl uridine
aaggctgtgctgaccatcgagtctttgtactctggtaccagaagctacaaagataaggcttcatgccgaaatcaacaccctgtcattttatggcagggtgtttttttctcgtcgatggtcagcacagcctt

SEQ ID NO: 24410 - RNA, 130 nt, synthetic construct
  source 1..130: mol_type = other RNA
  modified_base 1: mod_base = OTHER; note = 2'O-methyl adenosine phosphorothioate
  modified_base 2: mod_base = OTHER; note = 2'O-methyl adenosine phosphorothioate
  modified_base 3: mod_base = OTHER; note = 2'O-methyl guanosine phosphorothioate
  modified_base 127: mod_base = OTHER; note = guanosine phosphorothioate
  modified_base 128: mod_base = OTHER; note = 2'O-methyl cytidine phosphorothioate
  modified_base 129: mod_base = OTHER; note = 2'O-methyl cytidine phosphorothioate
  modified_base 130: mod_base = OTHER; note = 2'O-methyl uridine
aaggctgtgctgaccatcgagtctttgtactctggtaccagaagctacaaagataaggcttcatgccgaaatcaacaccctgtcattttatggcagggtgtttttttctcgtcgatggtcagcacagcct

SEQ ID NO: 24411 - RNA, 129 nt, synthetic construct
  source 1..129: mol_type = other RNA
  modified_base 1: mod_base = OTHER; note = 2'O-methyl adenosine phosphorothioate
  modified_base 2: mod_base = OTHER; note = 2'O-methyl adenosine phosphorothioate
  modified_base 3: mod_base = OTHER; note = 2'O-methyl guanosine phosphorothioate
  modified_base 126: mod_base = OTHER; note = adenosine phosphorothioate
  modified_base 127: mod_base = OTHER; note = 2'O-methyl guanosine phosphorothioate
  modified_base 128: mod_base = OTHER; note = 2'O-methyl cytidine phosphorothioate
  modified_base 129: mod_base = OTHER; note = 2'O-methyl cytidine
aaggctgtgctgaccatcgagtctttgtactctggtaccagaagctacaaagataaggcttcatgccgaaatcaacaccctgtcattttatggcagggtgtttttttctcgtcgatggtcagcacagcc

SEQ ID NO: 24412 - RNA, 128 nt, synthetic construct
  source 1..128: mol_type = other RNA
  modified_base 1: mod_base = OTHER; note = 2'O-methyl adenosine phosphorothioate
  modified_base 2: mod_base = OTHER; note = 2'O-methyl adenosine phosphorothioate
  modified_base 3: mod_base = OTHER; note = 2'O-methyl guanosine phosphorothioate
  modified_base 125: mod_base = OTHER; note = cytidine phosphorothioate
  modified_base 126: mod_base = OTHER; note = 2'O-methyl adenosine phosphorothioate
  modified_base 127: mod_base = OTHER; note = 2'O-methyl guanosine phosphorothioate
  modified_base 128: mod_base = OTHER; note = 2'O-methyl cytidine
aaggctgtgctgaccatcgagtctttgtactctggtaccagaagctacaaagataaggcttcatgccgaaatcaacaccctgtcattttatggcagggtgtttttttctcgtcgatggtcagcacagc

SEQ ID NO: 24413 - RNA, 127 nt, synthetic construct
  source 1..127: mol_type = other RNA
  modified_base 1: mod_base = OTHER; note = 2'O-methyl adenosine phosphorothioate
  modified_base 2: mod_base = OTHER; note = 2'O-methyl adenosine phosphorothioate
  modified_base 3: mod_base = OTHER; note = 2'O-methyl guanosine phosphorothioate
  modified_base 124: mod_base = OTHER; note = adenosine phosphorothioate
  modified_base 125: mod_base = OTHER; note = 2'O-methyl cytidine phosphorothioate
  modified_base 126: mod_base = OTHER; note = 2'O-methyl adenosine phosphorothioate
  modified_base 127: mod_base = OTHER; note = 2'O-methyl guanosine
aaggctgtgctgaccatcgagtctttgtactctggtaccagaagctacaaagataaggcttcatgccgaaatcaacaccctgtcattttatggcagggtgtttttttctcgtcgatggtcagcacag

SEQ ID NO: 24414 - RNA, 126 nt, synthetic construct
  source 1..126: mol_type = other RNA
  modified_base 1: mod_base = OTHER; note = 2'O-methyl adenosine phosphorothioate
  modified_base 2: mod_base = OTHER; note = 2'O-methyl adenosine phosphorothioate
  modified_base 3: mod_base = OTHER; note = 2'O-methyl guanosine phosphorothioate
  modified_base 123: mod_base = OTHER; note = cytidine phosphorothioate
  modified_base 124: mod_base = OTHER; note = 2'O-methyl adenosine phosphorothioate
  modified_base 125: mod_base = OTHER; note = 2'O-methyl cytidine phosphorothioate
  modified_base 126: mod_base = OTHER; note = 2'O-methyl adenosine
aaggctgtgctgaccatcgagtctttgtactctggtaccagaagctacaaagataaggcttcatgccgaaatcaacaccctgtcattttatggcagggtgtttttttctcgtcgatggtcagcaca

SEQ ID NO: 24415 - RNA, 125 nt, synthetic construct
  source 1..125: mol_type = other RNA
  modified_base 1: mod_base = OTHER; note = 2'O-methyl adenosine phosphorothioate
  modified_base 2: mod_base = OTHER; note = 2'O-methyl adenosine phosphorothioate
  modified_base 3: mod_base = OTHER; note = 2'O-methyl guanosine phosphorothioate
  modified_base 122: mod_base = OTHER; note = guanosine phosphorothioate
  modified_base 123: mod_base = OTHER; note = 2'O-methyl cytidine phosphorothioate
  modified_base 124: mod_base = OTHER; note = 2'O-methyl adenosine phosphorothioate
  modified_base 125: mod_base = OTHER; note = 2'O-methyl cytidine
aaggctgtgctgaccatcgagtctttgtactctggtaccagaagctacaaagataaggcttcatgccgaaatcaacaccctgtcattttatggcagggtgtttttttctcgtcgatggtcagcac

SEQ ID NO: 24416 - RNA, 124 nt, synthetic construct
  source 1..124: mol_type = other RNA
  modified_base 1: mod_base = OTHER; note = 2'O-methyl adenosine phosphorothioate
  modified_base 2: mod_base = OTHER; note = 2'O-methyl adenosine phosphorothioate
  modified_base 3: mod_base = OTHER; note = 2'O-methyl guanosine phosphorothioate
  modified_base 121: mod_base = OTHER; note = adenosine phosphorothioate
  modified_base 122: mod_base = OTHER; note = 2'O-methyl guanosine phosphorothioate
  modified_base 123: mod_base = OTHER; note = 2'O-methyl cytidine phosphorothioate
  modified_base 124: mod_base = OTHER; note = 2'O-methyl adenosine
aaggctgtgctgaccatcgagtctttgtactctggtaccagaagctacaaagataaggcttcatgccgaaatcaacaccctgtcattttatggcagggtgtttttttctcgtcgatggtcagca

SEQ ID NO: 24417 - RNA, 123 nt, synthetic construct
  source 1..123: mol_type = other RNA
  modified_base 1: mod_base = OTHER; note = 2'O-methyl adenosine phosphorothioate
  modified_base 2: mod_base = OTHER; note = 2'O-methyl adenosine phosphorothioate
  modified_base 3: mod_base = OTHER; note = 2'O-methyl guanosine phosphorothioate
  modified_base 120: mod_base = OTHER; note = cytidine phosphorothioate
  modified_base 121: mod_base = OTHER; note = 2'O-methyl adenosine phosphorothioate
  modified_base 122: mod_base = OTHER; note = 2'O-methyl guanosine phosphorothioate
  modified_base 123: mod_base = OTHER; note = 2'O-methyl cytidine
aaggctgtgctgaccatcgagtctttgtactctggtaccagaagctacaaagataaggcttcatgccgaaatcaacaccctgtcattttatggcagggtgtttttttctcgtcgatggtcagc

SEQ ID NO: 24418 - RNA, 122 nt, synthetic construct
  source 1..122: mol_type = other RNA
  modified_base 1: mod_base = OTHER; note = 2'O-methyl adenosine phosphorothioate
  modified_base 2: mod_base = OTHER; note = 2'O-methyl adenosine phosphorothioate
  modified_base 3: mod_base = OTHER; note = 2'O-methyl guanosine phosphorothioate
  modified_base 119: mod_base = OTHER; note = uridine phosphorothioate
  modified_base 120: mod_base = OTHER; note = 2'O-methyl cytidine phosphorothioate
  modified_base 121: mod_base = OTHER; note = 2'O-methyl adenosine phosphorothioate
  modified_base 122: mod_base = OTHER; note = 2'O-methyl guanosine
aaggctgtgctgaccatcgagtctttgtactctggtaccagaagctacaaagataaggcttcatgccgaaatcaacaccctgtcattttatggcagggtgtttttttctcgtcgatggtcag

SEQ ID NO: 24419 - RNA, 129 nt, synthetic construct
  source 1..129: mol_type = other RNA
  modified_base 1: mod_base = OTHER; note = 2'O-methyl adenosine phosphorothioate
  modified_base 2: mod_base = OTHER; note = 2'O-methyl adenosine phosphorothioate
  modified_base 3: mod_base = OTHER; note = 2'O-methyl guanosine phosphorothioate
  modified_base 126: mod_base = OTHER; note = cytidine phosphorothioate
  modified_base 127: mod_base = OTHER; note = 2'O-methyl cytidine phosphorothioate
  modified_base 128: mod_base = OTHER; note = 2'O-methyl uridine phosphorothioate
  modified_base 129: mod_base = OTHER; note = 2'O-methyl uridine
aaggctgtgctgaccatcgagtctttgtactctggtaccagaagctacaaagataaggcttcatgccgaaatcaacaccctgtcattttatggcagggtgtttttctcgtcgatggtcagcacagcctt

SEQ ID NO: 24420 - RNA, 128 nt, synthetic construct
  source 1..128: mol_type = other RNA
  modified_base 1: mod_base = OTHER; note = 2'O-methyl adenosine phosphorothioate
  modified_base 2: mod_base = OTHER; note = 2'O-methyl adenosine phosphorothioate
  modified_base 3: mod_base = OTHER; note = 2'O-methyl guanosine phosphorothioate
  modified_base 125: mod_base = OTHER; note = guanosine phosphorothioate
  modified_base 126: mod_base = OTHER; note = 2'O-methyl cytidine phosphorothioate
  modified_base 127: mod_base = OTHER; note = 2'O-methyl cytidine phosphorothioate
  modified_base 128: mod_base = OTHER; note = 2'O-methyl uridine
aaggctgtgctgaccatcgagtctttgtactctggtaccagaagctacaaagataaggcttcatgccgaaatcaacaccctgtcattttatggcagggtgtttttctcgtcgatggtcagcacagcct

SEQ ID NO: 24421 - RNA, 127 nt, synthetic construct
  source 1..127: mol_type = other RNA
  modified_base 1: mod_base = OTHER; note = 2'O-methyl adenosine phosphorothioate
  modified_base 2: mod_base = OTHER; note = 2'O-methyl adenosine phosphorothioate
  modified_base 3: mod_base = OTHER; note = 2'O-methyl guanosine phosphorothioate
  modified_base 124: mod_base = OTHER; note = adenosine phosphorothioate
  modified_base 125: mod_base = OTHER; note = 2'O-methyl guanosine phosphorothioate
  modified_base 126: mod_base = OTHER; note = 2'O-methyl cytidine phosphorothioate
  modified_base 127: mod_base = OTHER; note = 2'O-methyl cytidine
aaggctgtgctgaccatcgagtctttgtactctggtaccagaagctacaaagataaggcttcatgccgaaatcaacaccctgtcattttatggcagggtgtttttctcgtcgatggtcagcacagcc

SEQ ID NO: 24422 - RNA, 126 nt, synthetic construct
  source 1..126: mol_type = other RNA
  modified_base 1: mod_base = OTHER; note = 2'O-methyl adenosine phosphorothioate
  modified_base 2: mod_base = OTHER; note = 2'O-methyl adenosine phosphorothioate
  modified_base 3: mod_base = OTHER; note = 2'O-methyl guanosine phosphorothioate
  modified_base 123: mod_base = OTHER; note = cytidine phosphorothioate
  modified_base 124: mod_base = OTHER; note = 2'O-methyl adenosine phosphorothioate
  modified_base 125: mod_base = OTHER; note = 2'O-methyl guanosine phosphorothioate
  modified_base 126: mod_base = OTHER; note = 2'O-methyl cytidine
aaggctgtgctgaccatcgagtctttgtactctggtaccagaagctacaaagataaggcttcatgccgaaatcaacaccctgtcattttatggcagggtgtttttctcgtcgatggtcagcacagc

SEQ ID NO: 24423 - RNA, 125 nt, synthetic construct
  source 1..125: mol_type = other RNA
  modified_base 1: mod_base = OTHER; note = 2'O-methyl adenosine phosphorothioate
  modified_base 2: mod_base = OTHER; note = 2'O-methyl adenosine phosphorothioate
  modified_base 3: mod_base = OTHER; note = 2'O-methyl guanosine phosphorothioate
  modified_base 122: mod_base = OTHER; note = adenosine phosphorothioate
  modified_base 123: mod_base = OTHER; note = 2'O-methyl cytidine phosphorothioate
  modified_base 124: mod_base = OTHER; note = 2'O-methyl adenosine phosphorothioate
  modified_base 125: mod_base = OTHER; note = 2'O-methyl guanosine
aaggctgtgctgaccatcgagtctttgtactctggtaccagaagctacaaagataaggcttcatgccgaaatcaacaccctgtcattttatggcagggtgtttttctcgtcgatggtcagcacag

SEQ ID NO: 24424 - RNA, 124 nt, synthetic construct
  source 1..124: mol_type = other RNA
  modified_base 1: mod_base = OTHER; note = 2'O-methyl adenosine phosphorothioate
  modified_base 2: mod_base = OTHER; note = 2'O-methyl adenosine phosphorothioate
  modified_base 3: mod_base = OTHER; note = 2'O-methyl guanosine phosphorothioate
  modified_base 121: mod_base = OTHER; note = cytidine phosphorothioate
  modified_base 122: mod_base = OTHER; note = 2'O-methyl adenosine phosphorothioate
  modified_base 123: mod_base = OTHER; note = 2'O-methyl cytidine phosphorothioate
  modified_base 124: mod_base = OTHER; note = 2'O-methyl adenosine
aaggctgtgctgaccatcgagtctttgtactctggtaccagaagctacaaagataaggcttcatgccgaaatcaacaccctgtcattttatggcagggtgtttttctcgtcgatggtcagcaca

SEQ ID NO: 24425 - RNA, 123 nt, synthetic construct
  source 1..123: mol_type = other RNA
  modified_base 1: mod_base = OTHER; note = 2'O-methyl adenosine phosphorothioate
  modified_base 2: mod_base = OTHER; note = 2'O-methyl adenosine phosphorothioate
  modified_base 3: mod_base = OTHER; note = 2'O-methyl guanosine phosphorothioate
  modified_base 120: mod_base = OTHER; note = guanosine phosphorothioate
  modified_base 121: mod_base = OTHER; note = 2'O-methyl cytidine phosphorothioate
  modified_base 122: mod_base = OTHER; note = 2'O-methyl adenosine phosphorothioate
  modified_base 123: mod_base = OTHER; note = 2'O-methyl cytidine
aaggctgtgctgaccatcgagtctttgtactctggtaccagaagctacaaagataaggcttcatgccgaaatcaacaccctgtcattttatggcagggtgtttttctcgtcgatggtcagcac

SEQ ID NO: 24426 - RNA, 122 nt, synthetic construct
  source 1..122: mol_type = other RNA
  modified_base 1: mod_base = OTHER; note = 2'O-methyl adenosine phosphorothioate
  modified_base 2: mod_base = OTHER; note = 2'O-methyl adenosine phosphorothioate
  modified_base 3: mod_base = OTHER; note = 2'O-methyl guanosine phosphorothioate
  modified_base 119: mod_base = OTHER; note = adenosine phosphorothioate
  modified_base 120: mod_base = OTHER; note = 2'O-methyl guanosine phosphorothioate
  modified_base 121: mod_base = OTHER; note = 2'O-methyl cytidine phosphorothioate
  modified_base 122: mod_base = OTHER; note = 2'O-methyl adenosine
aaggctgtgctgaccatcgagtctttgtactctggtaccagaagctacaaagataaggcttcatgccgaaatcaacaccctgtcattttatggcagggtgtttttctcgtcgatggtcagca

SEQ ID NO: 24427 - RNA, 121 nt, synthetic construct
  source 1..121: mol_type = other RNA
  modified_base 1: mod_base = OTHER; note = 2'O-methyl adenosine phosphorothioate
  modified_base 2: mod_base = OTHER; note = 2'O-methyl adenosine phosphorothioate
  modified_base 3: mod_base = OTHER; note = 2'O-methyl guanosine phosphorothioate
  modified_base 118: mod_base = OTHER; note = cytidine phosphorothioate
  modified_base 119: mod_base = OTHER; note = 2'O-methyl adenosine phosphorothioate
  modified_base 120: mod_base = OTHER; note = 2'O-methyl guanosine phosphorothioate
  modified_base 121: mod_base = OTHER; note = 2'O-methyl cytidine
aaggctgtgctgaccatcgagtctttgtactctggtaccagaagctacaaagataaggcttcatgccgaaatcaacaccctgtcattttatggcagggtgtttttctcgtcgatggtcagc

SEQ ID NO: 24428 - RNA, 120 nt, synthetic construct
  source 1..120: mol_type = other RNA
  modified_base 1: mod_base = OTHER; note = 2'O-methyl adenosine phosphorothioate
  modified_base 2: mod_base = OTHER; note = 2'O-methyl adenosine phosphorothioate
  modified_base 3: mod_base = OTHER; note = 2'O-methyl guanosine phosphorothioate
  modified_base 117: mod_base = OTHER; note = uridine phosphorothioate
  modified_base 118: mod_base = OTHER; note = 2'O-methyl cytidine phosphorothioate
  modified_base 119: mod_base = OTHER; note = 2'O-methyl adenosine phosphorothioate
  modified_base 120: mod_base = OTHER; note = 2'O-methyl guanosine
aaggctgtgctgaccatcgagtctttgtactctggtaccagaagctacaaagataaggcttcatgccgaaatcaacaccctgtcattttatggcagggtgtttttctcgtcgatggtcag

SEQ ID NO: 24429 - RNA, 181 nt, synthetic construct
  source 1..181: mol_type = other RNA
  modified_base 1: mod_base = OTHER; note = 2'O-methyl uridine phosphorothioate
  modified_base 2: mod_base = OTHER; note = 2'O-methyl adenosine phosphorothioate
  modified_base 3: mod_base = OTHER; note = 2'O-methyl adenosine phosphorothioate
  modified_base 178: mod_base = OTHER; note = guanosine phosphorothioate
  modified_base 179: mod_base = OTHER; note = 2'O-methyl uridine phosphorothioate
  modified_base 180: mod_base = OTHER; note = 2'O-methyl uridine phosphorothioate
  modified_base 181: mod_base = OTHER; note = 2'O-methyl uridine
taaaaacatggccccagcagcttgttgtagctcccgaaacgttgctacaataaggccgtctgaaaagatgtgccgcaacgctctgccccttaaagcttctgctttaaggggcatcgttgccgtgcataaggctgtgctgaccatcgacgagaaagggactgaagctgctggggccatgttt

SEQ ID NO: 24430 - RNA, 180 nt, synthetic construct
  source 1..180: mol_type = other RNA
  modified_base 1: mod_base = OTHER; note = 2'O-methyl uridine phosphorothioate
  modified_base 2: mod_base = OTHER; note = 2'O-methyl adenosine phosphorothioate
  modified_base 3: mod_base = OTHER; note = 2'O-methyl adenosine phosphorothioate
  modified_base 177: mod_base = OTHER; note = uridine phosphorothioate
  modified_base 178: mod_base = OTHER; note = 2'O-methyl guanosine phosphorothioate
  modified_base 179: mod_base = OTHER; note = 2'O-methyl uridine phosphorothioate
  modified_base 180: mod_base = OTHER; note = 2'O-methyl uridine
taaaaacatggccccagcagcttgttgtagctcccgaaacgttgctacaataaggccgtctgaaaagatgtgccgcaacgctctgccccttaaagcttctgctttaaggggcatcgttgccgtgcataaggctgtgctgaccatcgacgagaaagggactgaagctgctggggccatgtt

SEQ ID NO: 24431 - RNA, 179 nt, synthetic construct
  source 1..179: mol_type = other RNA
  modified_base 1: mod_base = OTHER; note = 2'O-methyl uridine phosphorothioate
  modified_base 2: mod_base = OTHER; note = 2'O-methyl adenosine phosphorothioate
  modified_base 3: mod_base = OTHER; note = 2'O-methyl adenosine phosphorothioate
  modified_base 176: mod_base = OTHER; note = adenosine phosphorothioate
  modified_base 177: mod_base = OTHER; note = 2'O-methyl uridine phosphorothioate
  modified_base 178: mod_base = OTHER; note = 2'O-methyl guanosine phosphorothioate
  modified_base 179: mod_base = OTHER; note = 2'O-methyl uridine
taaaaacatggccccagcagcttgttgtagctcccgaaacgttgctacaataaggccgtctgaaaagatgtgccgcaacgctctgccccttaaagcttctgctttaaggggcatcgttgccgtgcataaggctgtgctgaccatcgacgagaaagggactgaagctgctggggccatgt

SEQ ID NO: 24432 - RNA, 178 nt, synthetic construct
  source 1..178: mol_type = other RNA
  modified_base 1: mod_base = OTHER; note = 2'O-methyl uridine phosphorothioate
  modified_base 2: mod_base = OTHER; note = 2'O-methyl adenosine phosphorothioate
  modified_base 3: mod_base = OTHER; note = 2'O-methyl adenosine phosphorothioate
  modified_base 175: mod_base = OTHER; note = cytidine phosphorothioate
  modified_base 176: mod_base = OTHER; note = 2'O-methyl adenosine phosphorothioate
  modified_base 177: mod_base = OTHER; note = 2'O-methyl uridine phosphorothioate
  modified_base 178: mod_base = OTHER; note = 2'O-methyl guanosine
taaaaacatggccccagcagcttgttgtagctcccgaaacgttgctacaataaggccgtctgaaaagatgtgccgcaacgctctgccccttaaagcttctgctttaaggggcatcgttgccgtgcataaggctgtgctgaccatcgacgagaaagggactgaagctgctggggccatg

SEQ ID NO: 24433 - RNA, 177 nt, synthetic construct
  source 1..177: mol_type = other RNA
  modified_base 1: mod_base = OTHER; note = 2'O-methyl uridine phosphorothioate
  modified_base 2: mod_base = OTHER; note = 2'O-methyl adenosine phosphorothioate
  modified_base 3: mod_base = OTHER; note = 2'O-methyl adenosine phosphorothioate
  modified_base 174: mod_base = OTHER; note = cytidine phosphorothioate
  modified_base 175: mod_base = OTHER; note = 2'O-methyl cytidine phosphorothioate
  modified_base 176: mod_base = OTHER; note = 2'O-methyl adenosine phosphorothioate
  modified_base 177: mod_base = OTHER; note = 2'O-methyl uridine
taaaaacatggccccagcagcttgttgtagctcccgaaacgttgctacaataaggccgtctgaaaagatgtgccgcaacgctctgccccttaaagcttctgctttaaggggcatcgttgccgtgcataaggctgtgctgaccatcgacgagaaagggactgaagctgctggggccat

SEQ ID NO: 24434 - RNA, 176 nt, synthetic construct
  source 1..176: mol_type = other RNA
  modified_base 1: mod_base = OTHER; note = 2'O-methyl uridine phosphorothioate
  modified_base 2: mod_base = OTHER; note = 2'O-methyl adenosine phosphorothioate
  modified_base 3: mod_base = OTHER; note = 2'O-methyl adenosine phosphorothioate
  modified_base 173: mod_base = OTHER; note = guanosine phosphorothioate
  modified_base 174: mod_base = OTHER; note = 2'O-methyl cytidine phosphorothioate
  modified_base 175: mod_base = OTHER; note = 2'O-methyl cytidine phosphorothioate
  modified_base 176: mod_base = OTHER; note = 2'O-methyl adenosine
taaaaacatggccccagcagcttgttgtagctcccgaaacgttgctacaataaggccgtctgaaaagatgtgccgcaacgctctgccccttaaagcttctgctttaaggggcatcgttgccgtgcataaggctgtgctgaccatcgacgagaaagggactgaagctgctggggcca

SEQ ID NO: 24435 - RNA, 175 nt, synthetic construct
  source 1..175: mol_type = other RNA
  modified_base 1: mod_base = OTHER; note = 2'O-methyl uridine phosphorothioate
  modified_base 2: mod_base = OTHER; note = 2'O-methyl adenosine phosphorothioate
  modified_base 3: mod_base = OTHER; note = 2'O-methyl adenosine phosphorothioate
  modified_base 172: mod_base = OTHER; note = guanosine phosphorothioate
  modified_base 173: mod_base = OTHER; note = 2'O-methyl guanosine phosphorothioate
  modified_base 174: mod_base = OTHER; note = 2'O-methyl cytidine phosphorothioate
  modified_base 175: mod_base = OTHER; note = 2'O-methyl cytidine
taaaaacatggccccagcagcttgttgtagctcccgaaacgttgctacaataaggccgtctgaaaagatgtgccgcaacgctctgccccttaaagcttctgctttaaggggcatcgttgccgtgcataaggctgtgctgaccatcgacgagaaagggactgaagctgctggggcc

SEQ ID NO: 24436 - RNA, 174 nt, synthetic construct
  source 1..174: mol_type = other RNA
  modified_base 1: mod_base = OTHER; note = 2'O-methyl uridine phosphorothioate
  modified_base 2: mod_base = OTHER; note = 2'O-methyl adenosine phosphorothioate
  modified_base 3: mod_base = OTHER; note = 2'O-methyl adenosine phosphorothioate
  modified_base 171: mod_base = OTHER; note = guanosine phosphorothioate
  modified_base 172: mod_base = OTHER; note = 2'O-methyl guanosine phosphorothioate
  modified_base 173: mod_base = OTHER; note = 2'O-methyl guanosine phosphorothioate
  modified_base 174: mod_base = OTHER; note = 2'O-methyl cytidine
taaaaacatggccccagcagcttgttgtagctcccgaaacgttgctacaataaggccgtctgaaaagatgtgccgcaacgctctgccccttaaagcttctgctttaaggggcatcgttgccgtgcataaggctgtgctgaccatcgacgagaaagggactgaagctgctggggc

SEQ ID NO: 24437 - RNA, 173 nt, synthetic construct
  source 1..173: mol_type = other RNA
  modified_base 1: mod_base = OTHER; note = 2'O-methyl uridine phosphorothioate
  modified_base 2: mod_base = OTHER; note = 2'O-methyl adenosine phosphorothioate
  modified_base 3: mod_base = OTHER; note = 2'O-methyl adenosine phosphorothioate
  modified_base 170: mod_base = OTHER; note = guanosine phosphorothioate
  modified_base 171: mod_base = OTHER; note = 2'O-methyl guanosine phosphorothioate
  modified_base 172: mod_base = OTHER; note = 2'O-methyl guanosine phosphorothioate
  modified_base 173: mod_base = OTHER; note = 2'O-methyl guanosine
taaaaacatggccccagcagcttgttgtagctcccgaaacgttgctacaataaggccgtctgaaaagatgtgccgcaacgctctgccccttaaagcttctgctttaaggggcatcgttgccgtgcataaggctgtgctgaccatcgacgagaaagggactgaagctgctgggg

SEQ ID NO: 24438 - RNA, 172 nt, synthetic construct
  source 1..172: mol_type = other RNA
  modified_base 1: mod_base = OTHER; note = 2'O-methyl uridine phosphorothioate
  modified_base 2: mod_base = OTHER; note = 2'O-methyl adenosine phosphorothioate
  modified_base 3: mod_base = OTHER; note = 2'O-methyl adenosine phosphorothioate
  modified_base 169: mod_base = OTHER; note = uridine phosphorothioate
  modified_base 170: mod_base = OTHER; note = 2'O-methyl guanosine phosphorothioate
  modified_base 171: mod_base = OTHER; note = 2'O-methyl guanosine phosphorothioate
  modified_base 172: mod_base = OTHER; note = 2'O-methyl guanosine
taaaaacatggccccagcagcttgttgtagctcccgaaacgttgctacaataaggccgtctgaaaagatgtgccgcaacgctctgccccttaaagcttctgctttaaggggcatcgttgccgtgcataaggctgtgctgaccatcgacgagaaagggactgaagctgctggg

SEQ ID NO: 24439 - RNA, 176 nt, synthetic construct
  source 1..176: mol_type = other RNA
  modified_base 1: mod_base = OTHER; note = 2'O-methyl uridine phosphorothioate
  modified_base 2: mod_base = OTHER; note = 2'O-methyl adenosine phosphorothioate
  modified_base 3: mod_base = OTHER; note = 2'O-methyl adenosine phosphorothioate
  modified_base 173: mod_base = OTHER; note = guanosine phosphorothioate
  modified_base 174: mod_base = OTHER; note = 2'O-methyl uridine phosphorothioate
  modified_base 175: mod_base = OTHER; note = 2'O-methyl uridine phosphorothioate
  modified_base 176: mod_base = OTHER; note = 2'O-methyl uridine
taaaaacatggccccagcagcttgttgtagctcccgaaacgttgctacaataaggccgtctgaaaagatgtgccgcaacgctctgccccttaaagcttctgctttaaggggcatcgttgcataaggctgtgctgaccatcgacgagaaagggactgaagctgctggggccatgttt

SEQ ID NO: 24440 - RNA, 175 nt, synthetic construct
  source 1..175: mol_type = other RNA
  modified_base 1: mod_base = OTHER; note = 2'O-methyl uridine phosphorothioate
  modified_base 2: mod_base = OTHER; note = 2'O-methyl adenosine phosphorothioate
  modified_base 3: mod_base = OTHER; note = 2'O-methyl adenosine phosphorothioate
  modified_base 172: mod_base = OTHER; note = uridine phosphorothioate
  modified_base 173: mod_base = OTHER; note = 2'O-methyl guanosine phosphorothioate
  modified_base 174: mod_base = OTHER; note = 2'O-methyl uridine phosphorothioate
  modified_base 175: mod_base = OTHER; note = 2'O-methyl uridine
taaaaacatggccccagcagcttgttgtagctcccgaaacgttgctacaataaggccgtctgaaaagatgtgccgcaacgctctgccccttaaagcttctgctttaaggggcatcgttgcataaggctgtgctgaccatcgacgagaaagggactgaagctgctggggccatgtt

SEQ ID NO: 24441 - RNA, 174 nt, synthetic construct
  source 1..174: mol_type = other RNA
  modified_base 1: mod_base = OTHER; note = 2'O-methyl uridine phosphorothioate
  modified_base 2: mod_base = OTHER; note = 2'O-methyl adenosine phosphorothioate
  modified_base 3: mod_base = OTHER; note = 2'O-methyl adenosine phosphorothioate
  modified_base 171: mod_base = OTHER; note = adenosine phosphorothioate
  modified_base 172: mod_base = OTHER; note = 2'O-methyl uridine phosphorothioate
  modified_base 173: mod_base = OTHER; note = 2'O-methyl guanosine phosphorothioate
  modified_base 174: mod_base = OTHER; note = 2'O-methyl uridine
taaaaacatggccccagcagcttgttgtagctcccgaaacgttgctacaataaggccgtctgaaaagatgtgccgcaacgctctgccccttaaagcttctgctttaaggggcatcgttgcataaggctgtgctgaccatcgacgagaaagggactgaagctgctggggccatgt

SEQ ID NO: 24442 - RNA, 173 nt, synthetic construct
  source 1..173: mol_type = other RNA
  modified_base 1: mod_base = OTHER; note = 2'O-methyl uridine phosphorothioate
  modified_base 2: mod_base = OTHER; note = 2'O-methyl adenosine phosphorothioate
  modified_base 3: mod_base = OTHER; note = 2'O-methyl adenosine phosphorothioate
  modified_base 170: mod_base = OTHER; note = cytidine phosphorothioate
  modified_base 171: mod_base = OTHER; note = 2'O-methyl adenosine phosphorothioate
  modified_base 172: mod_base = OTHER; note = 2'O-methyl uridine phosphorothioate
  modified_base 173: mod_base = OTHER; note = 2'O-methyl guanosine
taaaaacatggccccagcagcttgttgtagctcccgaaacgttgctacaataaggccgtctgaaaagatgtgccgcaacgctctgccccttaaagcttctgctttaaggggcatcgttgcataaggctgtgctgaccatcgacgagaaagggactgaagctgctggggccatg

SEQ ID NO: 24443 - RNA, 172 nt, synthetic construct
  source 1..172: mol_type = other RNA
  modified_base 1: mod_base = OTHER; note = 2'O-methyl uridine phosphorothioate
  modified_base 2: mod_base = OTHER; note = 2'O-methyl adenosine phosphorothioate
  modified_base 3: mod_base = OTHER; note = 2'O-methyl adenosine phosphorothioate
  modified_base 169: mod_base = OTHER; note = cytidine phosphorothioate
  modified_base 170: mod_base = OTHER; note = 2'O-methyl cytidine phosphorothioate
  modified_base 171: mod_base = OTHER; note = 2'O-methyl adenosine phosphorothioate
  modified_base 172: mod_base = OTHER; note = 2'O-methyl uridine
taaaaacatggccccagcagcttgttgtagctcccgaaacgttgctacaataaggccgtctgaaaagatgtgccgcaacgctctgccccttaaagcttctgctttaaggggcatcgttgcataaggctgtgctgaccatcgacgagaaagggactgaagctgctggggccat

SEQ ID NO: 24444 - RNA, 171 nt, synthetic construct
  source 1..171: mol_type = other RNA
  modified_base 1: mod_base = OTHER; note = 2'O-methyl uridine phosphorothioate
  modified_base 2: mod_base = OTHER; note = 2'O-methyl adenosine phosphorothioate
  modified_base 3: mod_base = OTHER; note = 2'O-methyl adenosine phosphorothioate
  modified_base 168: mod_base = OTHER; note = guanosine phosphorothioate
  modified_base 169: mod_base = OTHER; note = 2'O-methyl cytidine phosphorothioate
  modified_base 170: mod_base = OTHER; note = 2'O-methyl cytidine phosphorothioate
  modified_base 171: mod_base = OTHER; note = 2'O-methyl adenosine
taaaaacatggccccagcagcttgttgtagctcccgaaacgttgctacaataaggccgtctgaaaagatgtgccgcaacgctctgccccttaaagcttctgctttaaggggcatcgttgcataaggctgtgctgaccatcgacgagaaagggactgaagctgctggggcca

SEQ ID NO: 24445 - RNA, 170 nt, synthetic construct
  source 1..170: mol_type = other RNA
  modified_base 1: mod_base = OTHER; note = 2'O-methyl uridine phosphorothioate
  modified_base 2: mod_base = OTHER; note = 2'O-methyl adenosine phosphorothioate
  modified_base 3: mod_base = OTHER; note = 2'O-methyl adenosine phosphorothioate
  modified_base 167: mod_base = OTHER; note = guanosine phosphorothioate
  modified_base 168: mod_base = OTHER; note = 2'O-methyl guanosine phosphorothioate
  modified_base 169: mod_base = OTHER; note = 2'O-methyl cytidine phosphorothioate
  modified_base 170: mod_base = OTHER; note = 2'O-methyl cytidine
taaaaacatggccccagcagcttgttgtagctcccgaaacgttgctacaataaggccgtctgaaaagatgtgccgcaacgctctgccccttaaagcttctgctttaaggggcatcgttgcataaggctgtgctgaccatcgacgagaaagggactgaagctgctggggcc

SEQ ID NO: 24446 - RNA, 169 nt, synthetic construct
  source 1..169: mol_type = other RNA
  modified_base 1: mod_base = OTHER; note = 2'O-methyl uridine phosphorothioate
  modified_base 2: mod_base = OTHER; note = 2'O-methyl adenosine phosphorothioate
  modified_base 3: mod_base = OTHER; note = 2'O-methyl adenosine phosphorothioate
  modified_base 166: mod_base = OTHER; note = guanosine phosphorothioate
  modified_base 167: mod_base = OTHER; note = 2'O-methyl guanosine phosphorothioate
  modified_base 168: mod_base = OTHER; note = 2'O-methyl guanosine phosphorothioate
  modified_base 169: mod_base = OTHER; note = 2'O-methyl cytidine
taaaaacatggccccagcagcttgttgtagctcccgaaacgttgctacaataaggccgtctgaaaagatgtgccgcaacgctctgccccttaaagcttctgctttaaggggcatcgttgcataaggctgtgctgaccatcgacgagaaagggactgaagctgctggggc

SEQ ID NO: 24447 - RNA, 168 nt, synthetic construct
  source 1..168: mol_type = other RNA
  modified_base 1: mod_base = OTHER; note = 2'O-methyl uridine phosphorothioate
  modified_base 2: mod_base = OTHER; note = 2'O-methyl adenosine phosphorothioate
  modified_base 3: mod_base = OTHER; note = 2'O-methyl adenosine phosphorothioate
  modified_base 165: mod_base = OTHER; note = guanosine phosphorothioate
  modified_base 166: mod_base = OTHER; note = 2'O-methyl guanosine phosphorothioate
  modified_base 167: mod_base = OTHER; note = 2'O-methyl guanosine phosphorothioate
  modified_base 168: mod_base = OTHER; note = 2'O-methyl guanosine
taaaaacatggccccagcagcttgttgtagctcccgaaacgttgctacaataaggccgtctgaaaagatgtgccgcaacgctctgccccttaaagcttctgctttaaggggcatcgttgcataaggctgtgctgaccatcgacgagaaagggactgaagctgctgggg

SEQ ID NO: 24448 - RNA, 167 nt, synthetic construct
  source 1..167: mol_type = other RNA
  modified_base 1: mod_base = OTHER; note = 2'O-methyl uridine phosphorothioate
  modified_base 2: mod_base = OTHER; note = 2'O-methyl adenosine phosphorothioate
  modified_base 3: mod_base = OTHER; note = 2'O-methyl adenosine phosphorothioate
  modified_base 164: mod_base = OTHER; note = uridine phosphorothioate
  modified_base 165: mod_base = OTHER; note = 2'O-methyl guanosine phosphorothioate
  modified_base 166: mod_base = OTHER; note = 2'O-methyl guanosine phosphorothioate
  modified_base 167: mod_base = OTHER; note = 2'O-methyl guanosine
taaaaacatggccccagcagcttgttgtagctcccgaaacgttgctacaataaggccgtctgaaaagatgtgccgcaacgctctgccccttaaagcttctgctttaaggggcatcgttgcataaggctgtgctgaccatcgacgagaaagggactgaagctgctggg

SEQ ID NO: 24449 - RNA, 171 nt, synthetic construct
  source 1..171: mol_type = other RNA
  modified_base 1: mod_base = OTHER; note = 2'O-methyl uridine phosphorothioate
  modified_base 2: mod_base = OTHER; note = 2'O-methyl adenosine phosphorothioate
  modified_base 3: mod_base = OTHER; note = 2'O-methyl adenosine phosphorothioate
  modified_base 168: mod_base = OTHER; note = guanosine phosphorothioate
  modified_base 169: mod_base = OTHER; note = 2'O-methyl uridine phosphorothioate
  modified_base 170: mod_base = OTHER; note = 2'O-methyl uridine phosphorothioate
  modified_base 171: mod_base = OTHER; note = 2'O-methyl uridine
taaaaacatggccccagcagcttgttgtagctcccgaaacgttgctacaataaggccgtctgaaaagatgtgccgcaacgctctgccccttaaagcttctgctttaaggggcatcgttaggctgtgctgaccatcgacgagaaagggactgaagctgctggggccatgttt

SEQ ID NO: 24450 - RNA, 170 nt, synthetic construct
  source 1..170: mol_type = other RNA
  modified_base 1: mod_base = OTHER; note = 2'O-methyl uridine phosphorothioate
  modified_base 2: mod_base = OTHER; note = 2'O-methyl adenosine phosphorothioate
  modified_base 3: mod_base = OTHER; note = 2'O-methyl adenosine phosphorothioate
  modified_base 167: mod_base = OTHER; note = uridine phosphorothioate
  modified_base 168: mod_base = OTHER; note = 2'O-methyl guanosine phosphorothioate
  modified_base 169: mod_base = OTHER; note = 2'O-methyl uridine phosphorothioate
  modified_base 170: mod_base = OTHER; note = 2'O-methyl uridine
taaaaacatggccccagcagcttgttgtagctcccgaaacgttgctacaataaggccgtctgaaaagatgtgccgcaacgctctgccccttaaagcttctgctttaaggggcatcgttaggctgtgctgaccatcgacgagaaagggactgaagctgctggggccatgtt

SEQ ID NO: 24451 - RNA, 169 nt, synthetic construct
  source 1..169: mol_type = other RNA
  modified_base 1: mod_base = OTHER; note = 2'O-methyl uridine phosphorothioate
  modified_base 2: mod_base = OTHER; note = 2'O-methyl adenosine phosphorothioate
  modified_base 3: mod_base = OTHER; note = 2'O-methyl adenosine phosphorothioate
  modified_base 166: mod_base = OTHER; note = adenosine phosphorothioate
  modified_base 167: mod_base = OTHER; note = 2'O-methyl uridine phosphorothioate
  modified_base 168: mod_base = OTHER; note = 2'O-methyl guanosine phosphorothioate
  modified_base 169: mod_base = OTHER; note = 2'O-methyl uridine
taaaaacatggccccagcagcttgttgtagctcccgaaacgttgctacaataaggccgtctgaaaagatgtgccgcaacgctctgccccttaaagcttctgctttaaggggcatcgttaggctgtgctgaccatcgacgagaaagggactgaagctgctggggccatgt

SEQ ID NO: 24452 - RNA, 168 nt, synthetic construct
  source 1..168: mol_type = other RNA
  modified_base 1: mod_base = OTHER; note = 2'O-methyl uridine phosphorothioate
  modified_base 2: mod_base = OTHER; note = 2'O-methyl adenosine phosphorothioate
  modified_base 3: mod_base = OTHER; note = 2'O-methyl adenosine phosphorothioate
  modified_base 165: mod_base = OTHER; note = cytidine phosphorothioate
  modified_base 166: mod_base = OTHER; note = 2'O-methyl adenosine phosphorothioate
  modified_base 167: mod_base = OTHER; note = 2'O-methyl uridine phosphorothioate
  modified_base 168: mod_base = OTHER; note = 2'O-methyl guanosine
taaaaacatggccccagcagcttgttgtagctcccgaaacgttgctacaataaggccgtctgaaaagatgtgccgcaacgctctgccccttaaagcttctgctttaaggggcatcgttaggctgtgctgaccatcgacgagaaagggactgaagctgctggggccatg

SEQ ID NO: 24453 - RNA, 167 nt, synthetic construct
  source 1..167: mol_type = other RNA
  modified_base 1: mod_base = OTHER; note = 2'O-methyl uridine phosphorothioate
  modified_base 2: mod_base = OTHER; note = 2'O-methyl adenosine phosphorothioate
  modified_base 3: mod_base = OTHER; note = 2'O-methyl adenosine phosphorothioate
  modified_base 164: mod_base = OTHER; note = cytidine phosphorothioate
  modified_base 165: mod_base = OTHER; note = 2'O-methyl cytidine phosphorothioate
  modified_base 166: mod_base = OTHER; note = 2'O-methyl adenosine phosphorothioate
  modified_base 167: mod_base = OTHER; note = 2'O-methyl uridine
taaaaacatggccccagcagcttgttgtagctcccgaaacgttgctacaataaggccgtctgaaaagatgtgccgcaacgctctgccccttaaagcttctgctttaaggggcatcgttaggctgtgctgaccatcgacgagaaagggactgaagctgctggggccat

SEQ ID NO: 24454 - RNA, 166 nt, synthetic construct
  source 1..166: mol_type = other RNA
  modified_base 1: mod_base = OTHER; note = 2'O-methyl uridine phosphorothioate
  modified_base 2: mod_base = OTHER; note = 2'O-methyl adenosine phosphorothioate
  modified_base 3: mod_base = OTHER; note = 2'O-methyl adenosine phosphorothioate
  modified_base 163: mod_base = OTHER; note = guanosine phosphorothioate
  modified_base 164: mod_base = OTHER; note = 2'O-methyl cytidine phosphorothioate
  modified_base 165: mod_base = OTHER; note = 2'O-methyl cytidine phosphorothioate
  modified_base 166: mod_base = OTHER; note = 2'O-methyl adenosine
taaaaacatggccccagcagcttgttgtagctcccgaaacgttgctacaataaggccgtctgaaaagatgtgccgcaacgctctgccccttaaagcttctgctttaaggggcatcgttaggctgtgctgaccatcgacgagaaagggactgaagctgctggggcca

SEQ ID NO: 24455 - RNA, 165 nt, synthetic construct
  source 1..165: mol_type = other RNA
  modified_base 1: mod_base = OTHER; note = 2'O-methyl uridine phosphorothioate
  modified_base 2: mod_base = OTHER; note = 2'O-methyl adenosine phosphorothioate
  modified_base 3: mod_base = OTHER; note = 2'O-methyl adenosine phosphorothioate
  modified_base 162: mod_base = OTHER; note = guanosine phosphorothioate
  modified_base 163: mod_base = OTHER; note = 2'O-methyl guanosine phosphorothioate
  modified_base 164: mod_base = OTHER; note = 2'O-methyl cytidine phosphorothioate
  modified_base 165: mod_base = OTHER; note = 2'O-methyl cytidine
taaaaacatggccccagcagcttgttgtagctcccgaaacgttgctacaataaggccgtctgaaaagatgtgccgcaacgctctgccccttaaagcttctgctttaaggggcatcgttaggctgtgctgaccatcgacgagaaagggactgaagctgctggggcc

SEQ ID NO: 24456 - RNA, 164 nt, synthetic construct
  source 1..164: mol_type = other RNA
  modified_base 1: mod_base = OTHER; note = 2'O-methyl uridine phosphorothioate
  modified_base 2: mod_base = OTHER; note = 2'O-methyl adenosine phosphorothioate
  modified_base 3: mod_base = OTHER; note = 2'O-methyl adenosine phosphorothioate
  modified_base 161: mod_base = OTHER; note = guanosine phosphorothioate
  modified_base 162: mod_base = OTHER; note = 2'O-methyl guanosine phosphorothioate
  modified_base 163: mod_base = OTHER; note = 2'O-methyl guanosine phosphorothioate
  modified_base 164: mod_base = OTHER; note = 2'O-methyl cytidine
taaaaacatggccccagcagcttgttgtagctcccgaaacgttgctacaataaggccgtctgaaaagatgtgccgcaacgctctgccccttaaagcttctgctttaaggggcatcgttaggctgtgctgaccatcgacgagaaagggactgaagctgctggggc

SEQ ID NO: 24457 - RNA, 163 nt, synthetic construct
  source 1..163: mol_type = other RNA
  modified_base 1: mod_base = OTHER; note = 2'O-methyl uridine phosphorothioate
  modified_base 2: mod_base = OTHER; note = 2'O-methyl adenosine phosphorothioate
  modified_base 3: mod_base = OTHER; note = 2'O-methyl adenosine phosphorothioate
  modified_base 160: mod_base = OTHER; note = guanosine phosphorothioate
  modified_base 161: mod_base = OTHER; note = 2'O-methyl guanosine phosphorothioate
  modified_base 162: mod_base = OTHER; note = 2'O-methyl guanosine phosphorothioate
  modified_base 163: mod_base = OTHER; note = 2'O-methyl guanosine
taaaaacatggccccagcagcttgttgtagctcccgaaacgttgctacaataaggccgtctgaaaagatgtgccgcaacgctctgccccttaaagcttctgctttaaggggcatcgttaggctgtgctgaccatcgacgagaaagggactgaagctgctgggg

SEQ ID NO: 24458 - RNA, 162 nt, synthetic construct
  source 1..162: mol_type = other RNA
  modified_base 1: mod_base = OTHER; note = 2'O-methyl uridine phosphorothioate
  modified_base 2: mod_base = OTHER; note = 2'O-methyl adenosine phosphorothioate
  modified_base 3: mod_base = OTHER; note = 2'O-methyl adenosine phosphorothioate
  modified_base 159: mod_base = OTHER; note = uridine phosphorothioate
  modified_base 160: mod_base = OTHER; note = 2'O-methyl guanosine phosphorothioate
  modified_base 161: mod_base = OTHER; note = 2'O-methyl guanosine phosphorothioate
  modified_base 162: mod_base = OTHER; note = 2'O-methyl guanosine
taaaaacatggccccagcagcttgttgtagctcccgaaacgttgctacaataaggccgtctgaaaagatgtgccgcaacgctctgccccttaaagcttctgctttaaggggcatcgttaggctgtgctgaccatcgacgagaaagggactgaagctgctggg

SEQ ID NO: 24459 - RNA, 165 nt, synthetic construct
  source 1..165: mol_type = other RNA
  modified_base 1: mod_base = OTHER; note = 2'O-methyl uridine phosphorothioate
  modified_base 2: mod_base = OTHER; note = 2'O-methyl adenosine phosphorothioate
  modified_base 3: mod_base = OTHER; note = 2'O-methyl adenosine phosphorothioate
  modified_base 162: mod_base = OTHER; note = guanosine phosphorothioate
  modified_base 163: mod_base = OTHER; note = 2'O-methyl uridine phosphorothioate
  modified_base 164: mod_base = OTHER; note = 2'O-methyl uridine phosphorothioate
  modified_base 165: mod_base = OTHER; note = 2'O-methyl uridine
taaaaacatggccccagcagcttgttgtagctcccgaaacgttgctacaataaggccgtctgaaaagatgtgccgcaacgctctgccccttaaagcttctgctttaaggggcatcgtttgctgaccatcgacgagaaagggactgaagctgctggggccatgttt

SEQ ID NO: 24460 - RNA, 164 nt, synthetic construct
  source 1..164: mol_type = other RNA
  modified_base 1: mod_base = OTHER; note = 2'O-methyl uridine phosphorothioate
  modified_base 2: mod_base = OTHER; note = 2'O-methyl adenosine phosphorothioate
  modified_base 3: mod_base = OTHER; note = 2'O-methyl adenosine phosphorothioate
  modified_base 161: mod_base = OTHER; note = uridine phosphorothioate
  modified_base 162: mod_base = OTHER; note = 2'O-methyl guanosine phosphorothioate
  modified_base 163: mod_base = OTHER; note = 2'O-methyl uridine phosphorothioate
  modified_base 164: mod_base = OTHER; note = 2'O-methyl uridine
taaaaacatggccccagcagcttgttgtagctcccgaaacgttgctacaataaggccgtctgaaaagatgtgccgcaacgctctgccccttaaagcttctgctttaaggggcatcgtttgctgaccatcgacgagaaagggactgaagctgctggggccatgtt

SEQ ID NO: 24461 - RNA, 163 nt, synthetic construct
  source 1..163: mol_type = other RNA
  modified_base 1: mod_base = OTHER; note = 2'O-methyl uridine phosphorothioate
  modified_base 2: mod_base = OTHER; note = 2'O-methyl adenosine phosphorothioate
  modified_base 3: mod_base = OTHER; note = 2'O-methyl adenosine phosphorothioate
  modified_base 160: mod_base = OTHER; note = adenosine phosphorothioate
  modified_base 161: mod_base = OTHER; note = 2'O-methyl uridine phosphorothioate
  modified_base 162: mod_base = OTHER; note = 2'O-methyl guanosine phosphorothioate
  modified_base 163: mod_base = OTHER; note = 2'O-methyl uridine
taaaaacatggccccagcagcttgttgtagctcccgaaacgttgctacaataaggccgtctgaaaagatgtgccgcaacgctctgccccttaaagcttctgctttaaggggcatcgtttgctgaccatcgacgagaaagggactgaagctgctggggccatgt

SEQ ID NO: 24462 - RNA, 162 nt, synthetic construct
  source 1..162: mol_type = other RNA
  modified_base 1: mod_base = OTHER; note = 2'O-methyl uridine phosphorothioate
  modified_base 2: mod_base = OTHER; note = 2'O-methyl adenosine phosphorothioate
  modified_base 3: mod_base = OTHER; note = 2'O-methyl adenosine phosphorothioate
  modified_base 159: mod_base = OTHER; note = cytidine phosphorothioate
  modified_base 160: mod_base = OTHER; note = 2'O-methyl adenosine phosphorothioate
  modified_base 161: mod_base = OTHER; note = 2'O-methyl uridine phosphorothioate
  modified_base 162: mod_base = OTHER; note = 2'O-methyl guanosine
taaaaacatggccccagcagcttgttgtagctcccgaaacgttgctacaataaggccgtctgaaaagatgtgccgcaacgctctgccccttaaagcttctgctttaaggggcatcgtttgctgaccatcgacgagaaagggactgaagctgctggggccatg

SEQ ID NO: 24463 - RNA, 161 nt, synthetic construct
  source 1..161: mol_type = other RNA
  modified_base 1: mod_base = OTHER; note = 2'O-methyl uridine phosphorothioate
  modified_base 2: mod_base = OTHER; note = 2'O-methyl adenosine phosphorothioate
  modified_base 3: mod_base = OTHER; note = 2'O-methyl adenosine phosphorothioate
  modified_base 158: mod_base = OTHER; note = cytidine phosphorothioate
  modified_base 159: mod_base = OTHER; note = 2'O-methyl cytidine phosphorothioate
  modified_base 160: mod_base = OTHER; note = 2'O-methyl adenosine phosphorothioate
  modified_base 161: mod_base = OTHER; note = 2'O-methyl uridine
taaaaacatggccccagcagcttgttgtagctcccgaaacgttgctacaataaggccgtctgaaaagatgtgccgcaacgctctgccccttaaagcttctgctttaaggggcatcgtttgctgaccatcgacgagaaagggactgaagctgctggggccat

SEQ ID NO: 24464 - RNA, 160 nt, synthetic construct
  source 1..160: mol_type = other RNA
  modified_base 1: mod_base = OTHER; note = 2'O-methyl uridine phosphorothioate
  modified_base 2: mod_base = OTHER; note = 2'O-methyl adenosine phosphorothioate
  modified_base 3: mod_base = OTHER; note = 2'O-methyl adenosine phosphorothioate
  modified_base 157: mod_base = OTHER; note = guanosine phosphorothioate
  modified_base 158: mod_base = OTHER; note = 2'O-methyl cytidine phosphorothioate
  modified_base 159: mod_base = OTHER; note = 2'O-methyl cytidine phosphorothioate
  modified_base 160: mod_base = OTHER; note = 2'O-methyl adenosine
taaaaacatggccccagcagcttgttgtagctcccgaaacgttgctacaataaggccgtctgaaaagatgtgccgcaacgctctgccccttaaagcttctgctttaaggggcatcgtttgctgaccatcgacgagaaagggactgaagctgctggggcca

SEQ ID NO: 24465 - RNA, 159 nt, synthetic construct
  source 1..159: mol_type = other RNA
  modified_base 1: mod_base = OTHER; note = 2'O-methyl uridine phosphorothioate
  modified_base 2: mod_base = OTHER; note = 2'O-methyl adenosine phosphorothioate
  modified_base 3: mod_base = OTHER; note = 2'O-methyl adenosine phosphorothioate
  modified_base 156: mod_base = OTHER; note = guanosine phosphorothioate
  modified_base 157: mod_base = OTHER; note = 2'O-methyl guanosine phosphorothioate
  modified_base 158: mod_base = OTHER; note = 2'O-methyl cytidine phosphorothioate
  modified_base 159: mod_base = OTHER; note = 2'O-methyl cytidine
taaaaacatggccccagcagcttgttgtagctcccgaaacgttgctacaataaggccgtctgaaaagatgtgccgcaacgctctgccccttaaagcttctgctttaaggggcatcgtttgctgaccatcgacgagaaagggactgaagctgctggggcc

SEQ ID NO: 24466 - RNA, 158 nt, synthetic construct
  source 1..158: mol_type = other RNA
  modified_base 1: mod_base = OTHER; note = 2'O-methyl uridine phosphorothioate
  modified_base 2: mod_base = OTHER; note = 2'O-methyl adenosine phosphorothioate
  modified_base 3: mod_base = OTHER; note = 2'O-methyl adenosine phosphorothioate
  modified_base 155: mod_base = OTHER; note = guanosine phosphorothioate
  modified_base 156: mod_base = OTHER; note = 2'O-methyl guanosine phosphorothioate
  modified_base 157: mod_base = OTHER; note = 2'O-methyl guanosine phosphorothioate
  modified_base 158: mod_base = OTHER; note = 2'O-methyl cytidine
taaaaacatggccccagcagcttgttgtagctcccgaaacgttgctacaataaggccgtctgaaaagatgtgccgcaacgctctgccccttaaagcttctgctttaaggggcatcgtttgctgaccatcgacgagaaagggactgaagctgctggggc

SEQ ID NO: 24467 - RNA, 157 nt, synthetic construct
  source 1..157: mol_type = other RNA
  modified_base 1: mod_base = OTHER; note = 2'O-methyl uridine phosphorothioate
  modified_base 2: mod_base = OTHER; note = 2'O-methyl adenosine phosphorothioate
  modified_base 3: mod_base = OTHER; note = 2'O-methyl adenosine phosphorothioate
  modified_base 154: mod_base = OTHER; note = guanosine phosphorothioate
  modified_base 155: mod_base = OTHER; note = 2'O-methyl guanosine phosphorothioate
  modified_base 156: mod_base = OTHER; note = 2'O-methyl guanosine phosphorothioate
  modified_base 157: mod_base = OTHER; note = 2'O-methyl guanosine
taaaaacatggccccagcagcttgttgtagctcccgaaacgttgctacaataaggccgtctgaaaagatgtgccgcaacgctctgccccttaaagcttctgctttaaggggcatcgtttgctgaccatcgacgagaaagggactgaagctgctgggg

SEQ ID NO: 24468 - RNA, 156 nt, synthetic construct
  source 1..156: mol_type = other RNA
  modified_base 1: mod_base = OTHER; note = 2'O-methyl uridine phosphorothioate
  modified_base 2: mod_base = OTHER; note = 2'O-methyl adenosine phosphorothioate
  modified_base 3: mod_base = OTHER; note = 2'O-methyl adenosine phosphorothioate
  modified_base 153: mod_base = OTHER; note = uridine phosphorothioate
  modified_base 154: mod_base = OTHER; note = 2'O-methyl guanosine phosphorothioate
  modified_base 155: mod_base = OTHER; note = 2'O-methyl guanosine phosphorothioate
  modified_base 156: mod_base = OTHER; note = 2'O-methyl guanosine
taaaaacatggccccagcagcttgttgtagctcccgaaacgttgctacaataaggccgtctgaaaagatgtgccgcaacgctctgccccttaaagcttctgctttaaggggcatcgtttgctgaccatcgacgagaaagggactgaagctgctggg

SEQ ID NO: 24469 - RNA, 162 nt, synthetic construct
  source 1..162: mol_type = other RNA
  modified_base 1: mod_base = OTHER; note = 2'O-methyl uridine phosphorothioate
  modified_base 2: mod_base = OTHER; note = 2'O-methyl adenosine phosphorothioate
  modified_base 3: mod_base = OTHER; note = 2'O-methyl adenosine phosphorothioate
  modified_base 159: mod_base = OTHER; note = guanosine phosphorothioate
  modified_base 160: mod_base = OTHER; note = 2'O-methyl uridine phosphorothioate
  modified_base 161: mod_base = OTHER; note = 2'O-methyl uridine phosphorothioate
  modified_base 162: mod_base = OTHER; note = 2'O-methyl uridine
taaaaacatggccccagcagcttgttgtagctcccgaaacgttgctacaataaggccgtctgaaaagatgtgccgcaacgctctgccccttaaagcttctgctttaaggggcatcgtttgaccatcgacgagaaagggactgaagctgctggggccatgttt

SEQ ID NO: 24470 - RNA, 161 nt, synthetic construct
  source 1..161: mol_type = other RNA
  modified_base 1: mod_base = OTHER; note = 2'O-methyl uridine phosphorothioate
  modified_base 2: mod_base = OTHER; note = 2'O-methyl adenosine phosphorothioate
  modified_base 3: mod_base = OTHER; note = 2'O-methyl adenosine phosphorothioate
  modified_base 158: mod_base = OTHER; note = uridine phosphorothioate
  modified_base 159: mod_base = OTHER; note = 2'O-methyl guanosine phosphorothioate
  modified_base 160: mod_base = OTHER; note = 2'O-methyl uridine phosphorothioate
  modified_base 161: mod_base = OTHER; note = 2'O-methyl uridine
taaaaacatggccccagcagcttgttgtagctcccgaaacgttgctacaataaggccgtctgaaaagatgtgccgcaacgctctgccccttaaagcttctgctttaaggggcatcgtttgaccatcgacgagaaagggactgaagctgctggggccatgtt

SEQ ID NO: 24471 - RNA, 160 nt, synthetic construct
  source 1..160: mol_type = other RNA
  modified_base 1: mod_base = OTHER; note = 2'O-methyl uridine phosphorothioate
  modified_base 2: mod_base = OTHER; note = 2'O-methyl adenosine phosphorothioate
  modified_base 3: mod_base = OTHER; note = 2'O-methyl adenosine phosphorothioate
  modified_base 157: mod_base = OTHER; note = adenosine phosphorothioate
  modified_base 158: mod_base = OTHER; note = 2'O-methyl uridine phosphorothioate
  modified_base 159: mod_base = OTHER; note = 2'O-methyl guanosine phosphorothioate
  modified_base 160: mod_base = OTHER; note = 2'O-methyl uridine
taaaaacatggccccagcagcttgttgtagctcccgaaacgttgctacaataaggccgtctgaaaagatgtgccgcaacgctctgccccttaaagcttctgctttaaggggcatcgtttgaccatcgacgagaaagggactgaagctgctggggccatgt

SEQ ID NO: 24472 - RNA, 159 nt, synthetic construct
  source 1..159: mol_type = other RNA
  modified_base 1: mod_base = OTHER; note = 2'O-methyl uridine phosphorothioate
  modified_base 2: mod_base = OTHER; note = 2'O-methyl adenosine phosphorothioate
  modified_base 3: mod_base = OTHER; note = 2'O-methyl adenosine phosphorothioate
  modified_base 156: mod_base = OTHER; note = cytidine phosphorothioate
  modified_base 157: mod_base = OTHER; note = 2'O-methyl adenosine phosphorothioate
  modified_base 158: mod_base = OTHER; note = 2'O-methyl uridine phosphorothioate
  modified_base 159: mod_base = OTHER; note = 2'O-methyl guanosine
taaaaacatggccccagcagcttgttgtagctcccgaaacgttgctacaataaggccgtctgaaaagatgtgccgcaacgctctgccccttaaagcttctgctttaaggggcatcgtttgaccatcgacgagaaagggactgaagctgctggggccatg

SEQ ID NO: 24473 - RNA, 158 nt, synthetic construct
  source 1..158: mol_type = other RNA
  modified_base 1: mod_base = OTHER; note = 2'O-methyl uridine phosphorothioate
  modified_base 2: mod_base = OTHER; note = 2'O-methyl adenosine phosphorothioate
  modified_base 3: mod_base = OTHER; note = 2'O-methyl adenosine phosphorothioate
  modified_base 155: mod_base = OTHER; note = cytidine phosphorothioate
  modified_base 156: mod_base = OTHER; note = 2'O-methyl cytidine phosphorothioate
  modified_base 157: mod_base = OTHER; note = 2'O-methyl adenosine phosphorothioate
  modified_base 158: mod_base = OTHER; note = 2'O-methyl uridine
taaaaacatggccccagcagcttgttgtagctcccgaaacgttgctacaataaggccgtctgaaaagatgtgccgcaacgctctgccccttaaagcttctgctttaaggggcatcgtttgaccatcgacgagaaagggactgaagctgctggggccat

SEQ ID NO: 24474 - RNA, 157 nt, synthetic construct
  source 1..157: mol_type = other RNA
  modified_base 1: mod_base = OTHER; note = 2'O-methyl uridine phosphorothioate
  modified_base 2: mod_base = OTHER; note = 2'O-methyl adenosine phosphorothioate
  modified_base 3: mod_base = OTHER; note = 2'O-methyl adenosine phosphorothioate
  modified_base 154: mod_base = OTHER; note = guanosine phosphorothioate
  modified_base 155: mod_base = OTHER; note = 2'O-methyl cytidine phosphorothioate
  modified_base 156: mod_base = OTHER; note = 2'O-methyl cytidine phosphorothioate
  modified_base 157: mod_base = OTHER; note = 2'O-methyl adenosine
taaaaacatggccccagcagcttgttgtagctcccgaaacgttgctacaataaggccgtctgaaaagatgtgccgcaacgctctgccccttaaagcttctgctttaaggggcatcgtttgaccatcgacgagaaagggactgaagctgctggggcca

SEQ ID NO: 24475 - RNA, 156 nt, synthetic construct
  source 1..156: mol_type = other RNA
  modified_base 1: mod_base = OTHER; note = 2'O-methyl uridine phosphorothioate
  modified_base 2: mod_base = OTHER; note = 2'O-methyl adenosine phosphorothioate
  modified_base 3: mod_base = OTHER; note = 2'O-methyl adenosine phosphorothioate
  modified_base 153: mod_base = OTHER; note = guanosine phosphorothioate
  modified_base 154: mod_base = OTHER; note = 2'O-methyl guanosine phosphorothioate
  modified_base 155: mod_base = OTHER; note = 2'O-methyl cytidine phosphorothioate
  modified_base 156: mod_base = OTHER; note = 2'O-methyl cytidine
taaaaacatggccccagcagcttgttgtagctcccgaaacgttgctacaataaggccgtctgaaaagatgtgccgcaacgctctgccccttaaagcttctgctttaaggggcatcgtttgaccatcgacgagaaagggactgaagctgctggggcc

SEQ ID NO: 24476 - RNA, 155 nt, synthetic construct
  source 1..155: mol_type = other RNA
  modified_base 1: mod_base = OTHER; note = 2'O-methyl uridine phosphorothioate
  modified_base 2: mod_base = OTHER; note = 2'O-methyl adenosine phosphorothioate
  modified_base 3: mod_base = OTHER; note = 2'O-methyl adenosine phosphorothioate
  modified_base 152: mod_base = OTHER; note = guanosine phosphorothioate
  modified_base 153: mod_base = OTHER; note = 2'O-methyl guanosine phosphorothioate
  modified_base 154: mod_base = OTHER; note = 2'O-methyl guanosine phosphorothioate
  modified_base 155: mod_base = OTHER; note = 2'O-methyl cytidine
taaaaacatggccccagcagcttgttgtagctcccgaaacgttgctacaataaggccgtctgaaaagatgtgccgcaacgctctgccccttaaagcttctgctttaaggggcatcgtttgaccatcgacgagaaagggactgaagctgctggggc

SEQ ID NO: 24477 - RNA, 154 nt, synthetic construct
  source 1..154: mol_type = other RNA
  modified_base 1: mod_base = OTHER; note = 2'O-methyl uridine phosphorothioate
  modified_base 2: mod_base = OTHER; note = 2'O-methyl adenosine phosphorothioate
  modified_base 3: mod_base = OTHER; note = 2'O-methyl adenosine phosphorothioate
  modified_base 151: mod_base = OTHER; note = guanosine phosphorothioate
  modified_base 152: mod_base = OTHER; note = 2'O-methyl guanosine phosphorothioate
  modified_base 153: mod_base = OTHER; note = 2'O-methyl guanosine phosphorothioate
  modified_base 154: mod_base = OTHER; note = 2'O-methyl guanosine
taaaaacatggccccagcagcttgttgtagctcccgaaacgttgctacaataaggccgtctgaaaagatgtgccgcaacgctctgccccttaaagcttctgctttaaggggcatcgtttgaccatcgacgagaaagggactgaagctgctgggg

SEQ ID NO: 24478 - RNA, 153 nt, synthetic construct
  source 1..153: mol_type = other RNA
  modified_base 1: mod_base = OTHER; note = 2'O-methyl uridine phosphorothioate
  modified_base 2: mod_base = OTHER; note = 2'O-methyl adenosine phosphorothioate
  modified_base 3: mod_base = OTHER; note = 2'O-methyl adenosine phosphorothioate
  modified_base 150: mod_base = OTHER; note = uridine phosphorothioate
  modified_base 151: mod_base = OTHER; note = 2'O-methyl guanosine phosphorothioate
  modified_base 152: mod_base = OTHER; note = 2'O-methyl guanosine phosphorothioate
  modified_base 153: mod_base = OTHER; note = 2'O-methyl guanosine
taaaaacatggccccagcagcttgttgtagctcccgaaacgttgctacaataaggccgtctgaaaagatgtgccgcaacgctctgccccttaaagcttctgctttaaggggcatcgtttgaccatcgacgagaaagggactgaagctgctggg

SEQ ID NO: 24479 - RNA, 160 nt, synthetic construct
  source 1..160: mol_type = other RNA
  modified_base 1: mod_base = OTHER; note = 2'O-methyl uridine phosphorothioate
  modified_base 2: mod_base = OTHER; note = 2'O-methyl adenosine phosphorothioate
  modified_base 3: mod_base = OTHER; note = 2'O-methyl adenosine phosphorothioate
  modified_base 157: mod_base = OTHER; note = guanosine phosphorothioate
  modified_base 158: mod_base = OTHER; note = 2'O-methyl uridine phosphorothioate
  modified_base 159: mod_base = OTHER; note = 2'O-methyl uridine phosphorothioate
  modified_base 160: mod_base = OTHER; note = 2'O-methyl uridine
taaaaacatggccccagcagcttgttgtagctcccgaaacgttgctacaataaggccgtctgaaaagatgtgccgcaacgctctgccccttaaagcttctgctttaaggggcatcgttaccatcgacgagaaagggactgaagctgctggggccatgttt

SEQ ID NO: 24480 - RNA, 159 nt, synthetic construct
  source 1..159: mol_type = other RNA
  modified_base 1: mod_base = OTHER; note = 2'O-methyl uridine phosphorothioate
  modified_base 2: mod_base = OTHER; note = 2'O-methyl adenosine phosphorothioate
  modified_base 3: mod_base = OTHER; note = 2'O-methyl adenosine phosphorothioate
  modified_base 156: mod_base = OTHER; note = uridine phosphorothioate
  modified_base 157: mod_base = OTHER; note = 2'O-methyl guanosine phosphorothioate
  modified_base 158: mod_base = OTHER; note = 2'O-methyl uridine phosphorothioate
  modified_base 159: mod_base = OTHER; note = 2'O-methyl uridine
taaaaacatggccccagcagcttgttgtagctcccgaaacgttgctacaataaggccgtctgaaaagatgtgccgcaacgctctgccccttaaagcttctgctttaaggggcatcgttaccatcgacgagaaagggactgaagctgctggggccatgtt

SEQ ID NO: 24481 - RNA, 158 nt, synthetic construct
  source 1..158: mol_type = other RNA
  modified_base 1: mod_base = OTHER; note = 2'O-methyl uridine phosphorothioate
  modified_base 2: mod_base = OTHER; note = 2'O-methyl adenosine phosphorothioate
  modified_base 3: mod_base = OTHER; note = 2'O-methyl adenosine phosphorothioate
  modified_base 155: mod_base = OTHER; note = adenosine phosphorothioate
  modified_base 156: mod_base = OTHER; note = 2'O-methyl uridine phosphorothioate
  modified_base 157: mod_base = OTHER; note = 2'O-methyl guanosine phosphorothioate
  modified_base 158: mod_base = OTHER; note = 2'O-methyl uridine
taaaaacatggccccagcagcttgttgtagctcccgaaacgttgctacaataaggccgtctgaaaagatgtgccgcaacgctctgccccttaaagcttctgctttaaggggcatcgttaccatcgacgagaaagggactgaagctgctggggccatgt

SEQ ID NO: 24482 - RNA, 157 nt, synthetic construct
  source 1..157: mol_type = other RNA
  modified_base 1: mod_base = OTHER; note = 2'O-methyl uridine phosphorothioate
  modified_base 2: mod_base = OTHER; note = 2'O-methyl adenosine phosphorothioate
  modified_base 3: mod_base = OTHER; note = 2'O-methyl adenosine phosphorothioate
  modified_base 154: mod_base = OTHER; note = cytidine phosphorothioate
  modified_base 155: mod_base = OTHER; note = 2'O-methyl adenosine phosphorothioate
  modified_base 156: mod_base = OTHER; note = 2'O-methyl uridine phosphorothioate
  modified_base 157: mod_base = OTHER; note = 2'O-methyl guanosine
taaaaacatggccccagcagcttgttgtagctcccgaaacgttgctacaataaggccgtctgaaaagatgtgccgcaacgctctgccccttaaagcttctgctttaaggggcatcgttaccatcgacgagaaagggactgaagctgctggggccatg

SEQ ID NO: 24483 - RNA, 156 nt, synthetic construct
  source 1..156: mol_type = other RNA
  modified_base 1: mod_base = OTHER; note = 2'O-methyl uridine phosphorothioate
  modified_base 2: mod_base = OTHER; note = 2'O-methyl adenosine phosphorothioate
  modified_base 3: mod_base = OTHER; note = 2'O-methyl adenosine phosphorothioate
  modified_base 153: mod_base = OTHER; note = cytidine phosphorothioate
  modified_base 154: mod_base = OTHER; note = 2'O-methyl cytidine phosphorothioate
  modified_base 155: mod_base = OTHER; note = 2'O-methyl adenosine phosphorothioate
  modified_base 156: mod_base = OTHER; note = 2'O-methyl uridine
taaaaacatggccccagcagcttgttgtagctcccgaaacgttgctacaataaggccgtctgaaaagatgtgccgcaacgctctgccccttaaagcttctgctttaaggggcatcgttaccatcgacgagaaagggactgaagctgctggggccat

SEQ ID NO: 24484 - RNA, 155 nt, synthetic construct
  source 1..155: mol_type = other RNA
  modified_base 1: mod_base = OTHER; note = 2'O-methyl uridine phosphorothioate
  modified_base 2: mod_base = OTHER; note = 2'O-methyl adenosine phosphorothioate
  modified_base 3: mod_base = OTHER; note = 2'O-methyl adenosine phosphorothioate
  modified_base 152: mod_base = OTHER; note = guanosine phosphorothioate
  modified_base 153: mod_base = OTHER; note = 2'O-methyl cytidine phosphorothioate
  modified_base 154: mod_base = OTHER; note = 2'O-methyl cytidine phosphorothioate
  modified_base 155: mod_base = OTHER; note = 2'O-methyl adenosine
taaaaacatggccccagcagcttgttgtagctcccgaaacgttgctacaataaggccgtctgaaaagatgtgccgcaacgctctgccccttaaagcttctgctttaaggggcatcgttaccatcgacgagaaagggactgaagctgctggggcca

SEQ ID NO: 24485 - RNA, 154 nt, synthetic construct
  source 1..154: mol_type = other RNA
  modified_base 1: mod_base = OTHER; note = 2'O-methyl uridine phosphorothioate
  modified_base 2: mod_base = OTHER; note = 2'O-methyl adenosine phosphorothioate
  modified_base 3: mod_base = OTHER; note = 2'O-methyl adenosine phosphorothioate
  modified_base 151: mod_base = OTHER; note = guanosine phosphorothioate
  modified_base 152: mod_base = OTHER; note = 2'O-methyl guanosine phosphorothioate
  modified_base 153: mod_base = OTHER; note = 2'O-methyl cytidine phosphorothioate
  modified_base 154: mod_base = OTHER; note = 2'O-methyl cytidine
taaaaacatggccccagcagcttgttgtagctcccgaaacgttgctacaataaggccgtctgaaaagatgtgccgcaacgctctgccccttaaagcttctgctttaaggggcatcgttaccatcgacgagaaagggactgaagctgctggggcc

SEQ ID NO: 24486 - RNA, 153 nt, synthetic construct
  source 1..153: mol_type = other RNA
  modified_base 1: mod_base = OTHER; note = 2'O-methyl uridine phosphorothioate
  modified_base 2: mod_base = OTHER; note = 2'O-methyl adenosine phosphorothioate
  modified_base 3: mod_base = OTHER; note = 2'O-methyl adenosine phosphorothioate
  modified_base 150: mod_base = OTHER; note = guanosine phosphorothioate
  modified_base 151: mod_base = OTHER; note = 2'O-methyl guanosine phosphorothioate
  modified_base 152: mod_base = OTHER; note = 2'O-methyl guanosine phosphorothioate
  modified_base 153: mod_base = OTHER; note = 2'O-methyl cytidine
taaaaacatggccccagcagcttgttgtagctcccgaaacgttgctacaataaggccgtctgaaaagatgtgccgcaacgctctgccccttaaagcttctgctttaaggggcatcgttaccatcgacgagaaagggactgaagctgctggggc

SEQ ID NO: 24487 - RNA, 152 nt, synthetic construct
  source 1..152: mol_type = other RNA
  modified_base 1: mod_base = OTHER; note = 2'O-methyl uridine phosphorothioate
  modified_base 2: mod_base = OTHER; note = 2'O-methyl adenosine phosphorothioate
  modified_base 3: mod_base = OTHER; note = 2'O-methyl adenosine phosphorothioate
  modified_base 149: mod_base = OTHER; note = guanosine phosphorothioate
  modified_base 150: mod_base = OTHER; note = 2'O-methyl guanosine phosphorothioate
  modified_base 151: mod_base = OTHER; note = 2'O-methyl guanosine phosphorothioate
  modified_base 152: mod_base = OTHER; note = 2'O-methyl guanosine
taaaaacatggccccagcagcttgttgtagctcccgaaacgttgctacaataaggccgtctgaaaagatgtgccgcaacgctctgccccttaaagcttctgctttaaggggcatcgttaccatcgacgagaaagggactgaagctgctgggg

SEQ ID NO: 24488 - RNA, 151 nt, synthetic construct
  source 1..151: mol_type = other RNA
  modified_base 1: mod_base = OTHER; note = 2'O-methyl uridine phosphorothioate
  modified_base 2: mod_base = OTHER; note = 2'O-methyl adenosine phosphorothioate
  modified_base 3: mod_base = OTHER; note = 2'O-methyl adenosine phosphorothioate
  modified_base 148: mod_base = OTHER; note = uridine phosphorothioate
  modified_base 149: mod_base = OTHER; note = 2'O-methyl guanosine phosphorothioate
  modified_base 150: mod_base = OTHER; note = 2'O-methyl guanosine phosphorothioate
  modified_base 151: mod_base = OTHER; note = 2'O-methyl guanosine
taaaaacatggccccagcagcttgttgtagctcccgaaacgttgctacaataaggccgtctgaaaagatgtgccgcaacgctctgccccttaaagcttctgctttaaggggcatcgttaccatcgacgagaaagggactgaagctgctggg

SEQ ID NO: 24489 - RNA, 157 nt, synthetic construct
  source 1..157: mol_type = other RNA
  modified_base 1: mod_base = OTHER; note = 2'O-methyl uridine phosphorothioate
  modified_base 2: mod_base = OTHER; note = 2'O-methyl adenosine phosphorothioate
  modified_base 3: mod_base = OTHER; note = 2'O-methyl adenosine phosphorothioate
  modified_base 154: mod_base = OTHER; note = guanosine phosphorothioate
  modified_base 155: mod_base = OTHER; note = 2'O-methyl uridine phosphorothioate
  modified_base 156: mod_base = OTHER; note = 2'O-methyl uridine phosphorothioate
  modified_base 157: mod_base = OTHER; note = 2'O-methyl uridine
taaaaacatggccccagcagcttgttgtagctcccgaaacgttgctacaataaggccgtctgaaaagatgtgccgcaacgctctgccccttaaagcttctgctttaaggggcatcgttatcgacgagaaagggactgaagctgctggggccatgttt

SEQ ID NO: 24490 - RNA, 156 nt, synthetic construct
  source 1..156: mol_type = other RNA
  modified_base 1: mod_base = OTHER; note = 2'O-methyl uridine phosphorothioate
  modified_base 2: mod_base = OTHER; note = 2'O-methyl adenosine phosphorothioate
  modified_base 3: mod_base = OTHER; note = 2'O-methyl adenosine phosphorothioate
  modified_base 153: mod_base = OTHER; note = uridine phosphorothioate
  modified_base 154: mod_base = OTHER; note = 2'O-methyl guanosine phosphorothioate
  modified_base 155: mod_base = OTHER; note = 2'O-methyl uridine phosphorothioate
  modified_base 156: mod_base = OTHER; note = 2'O-methyl uridine
taaaaacatggccccagcagcttgttgtagctcccgaaacgttgctacaataaggccgtctgaaaagatgtgccgcaacgctctgccccttaaagcttctgctttaaggggcatcgttatcgacgagaaagggactgaagctgctggggccatgtt

SEQ ID NO: 24491 - RNA, 155 nt, synthetic construct
  source 1..155: mol_type = other RNA
  modified_base 1: mod_base = OTHER; note = 2'O-methyl uridine phosphorothioate
  modified_base 2: mod_base = OTHER; note = 2'O-methyl adenosine phosphorothioate
  modified_base 3: mod_base = OTHER; note = 2'O-methyl adenosine phosphorothioate
  modified_base 152: mod_base = OTHER; note = adenosine phosphorothioate
  modified_base 153: mod_base = OTHER; note = 2'O-methyl uridine phosphorothioate
  modified_base 154: mod_base = OTHER; note = 2'O-methyl guanosine phosphorothioate
  modified_base 155: mod_base = OTHER; note = 2'O-methyl uridine
taaaaacatggccccagcagcttgttgtagctcccgaaacgttgctacaataaggccgtctgaaaagatgtgccgcaacgctctgccccttaaagcttctgctttaaggggcatcgttatcgacgagaaagggactgaagctgctggggccatgt

SEQ ID NO: 24492 - RNA, 154 nt, synthetic construct
  source 1..154: mol_type = other RNA
  modified_base 1: mod_base = OTHER; note = 2'O-methyl uridine phosphorothioate
  modified_base 2: mod_base = OTHER; note = 2'O-methyl adenosine phosphorothioate
  modified_base 3: mod_base = OTHER; note = 2'O-methyl adenosine phosphorothioate
  modified_base 151: mod_base = OTHER; note = cytidine phosphorothioate
  modified_base 152: mod_base = OTHER; note = 2'O-methyl adenosine phosphorothioate
  modified_base 153: mod_base = OTHER; note = 2'O-methyl uridine phosphorothioate
  modified_base 154: mod_base = OTHER; note = 2'O-methyl guanosine
taaaaacatggccccagcagcttgttgtagctcccgaaacgttgctacaataaggccgtctgaaaagatgtgccgcaacgctctgccccttaaagcttctgctttaaggggcatcgttatcgacgagaaagggactgaagctgctggggccatg

SEQ ID NO: 24493 - RNA, 153 nt, synthetic construct
  source 1..153: mol_type = other RNA
  modified_base 1: mod_base = OTHER; note = 2'O-methyl uridine phosphorothioate
  modified_base 2: mod_base = OTHER; note = 2'O-methyl adenosine phosphorothioate
  modified_base 3: mod_base = OTHER; note = 2'O-methyl adenosine phosphorothioate
  modified_base 150: mod_base = OTHER; note = cytidine phosphorothioate
  modified_base 151: mod_base = OTHER; note = 2'O-methyl cytidine phosphorothioate
  modified_base 152: mod_base = OTHER; note = 2'O-methyl adenosine phosphorothioate
  modified_base 153: mod_base = OTHER; note = 2'O-methyl uridine
taaaaacatggccccagcagcttgttgtagctcccgaaacgttgctacaataaggccgtctgaaaagatgtgccgcaacgctctgccccttaaagcttctgctttaaggggcatcgttatcgacgagaaagggactgaagctgctggggccat

SEQ ID NO: 24494 - RNA, 152 nt, synthetic construct
  source 1..152: mol_type = other RNA
  modified_base 1: mod_base = OTHER; note = 2'O-methyl uridine phosphorothioate
  modified_base 2: mod_base = OTHER; note = 2'O-methyl adenosine phosphorothioate
  modified_base 3: mod_base = OTHER; note = 2'O-methyl adenosine phosphorothioate
  modified_base 149: mod_base = OTHER; note = guanosine phosphorothioate
  modified_base 150: mod_base = OTHER; note = 2'O-methyl cytidine phosphorothioate
  modified_base 151: mod_base = OTHER; note = 2'O-methyl cytidine phosphorothioate
  modified_base 152: mod_base = OTHER; note = 2'O-methyl adenosine
taaaaacatggccccagcagcttgttgtagctcccgaaacgttgctacaataaggccgtctgaaaagatgtgccgcaacgctctgccccttaaagcttctgctttaaggggcatcgttatcgacgagaaagggactgaagctgctggggcca

SEQ ID NO: 24495 - RNA, 151 nt, synthetic construct
  source 1..151: mol_type = other RNA
  modified_base 1: mod_base = OTHER; note = 2'O-methyl uridine phosphorothioate
  modified_base 2: mod_base = OTHER; note = 2'O-methyl adenosine phosphorothioate
  modified_base 3: mod_base = OTHER; note = 2'O-methyl adenosine phosphorothioate
  modified_base 148: mod_base = OTHER; note = guanosine phosphorothioate
  modified_base 149: mod_base = OTHER; note = 2'O-methyl guanosine phosphorothioate
  modified_base 150: mod_base = OTHER; note = 2'O-methyl cytidine phosphorothioate
  modified_base 151: mod_base = OTHER; note = 2'O-methyl cytidine
taaaaacatggccccagcagcttgttgtagctcccgaaacgttgctacaataaggccgtctgaaaagatgtgccgcaacgctctgccccttaaagcttctgctttaaggggcatcgttatcgacgagaaagggactgaagctgctggggcc

SEQ ID NO: 24496 - RNA, 150 nt, synthetic construct
  source 1..150: mol_type = other RNA
  modified_base 1: mod_base = OTHER; note = 2'O-methyl uridine phosphorothioate
  modified_base 2: mod_base = OTHER; note = 2'O-methyl adenosine phosphorothioate
  modified_base 3: mod_base = OTHER; note = 2'O-methyl adenosine phosphorothioate
  modified_base 147: mod_base = OTHER; note = guanosine phosphorothioate
  modified_base 148: mod_base = OTHER; note = 2'O-methyl guanosine phosphorothioate
  modified_base 149: mod_base = OTHER; note = 2'O-methyl guanosine phosphorothioate
  modified_base 150: mod_base = OTHER; note = 2'O-methyl cytidine
taaaaacatggccccagcagcttgttgtagctcccgaaacgttgctacaataaggccgtctgaaaagatgtgccgcaacgctctgccccttaaagcttctgctttaaggggcatcgttatcgacgagaaagggactgaagctgctggggc

SEQ ID NO: 24497 - RNA, 149 nt, synthetic construct
  source 1..149: mol_type = other RNA
  modified_base 1: mod_base = OTHER; note = 2'O-methyl uridine phosphorothioate
  modified_base 2: mod_base = OTHER; note = 2'O-methyl adenosine phosphorothioate
  modified_base 3: mod_base = OTHER; note = 2'O-methyl adenosine phosphorothioate
  modified_base 146: mod_base = OTHER; note = guanosine phosphorothioate
  modified_base 147: mod_base = OTHER; note = 2'O-methyl guanosine phosphorothioate
  modified_base 148: mod_base = OTHER; note = 2'O-methyl guanosine phosphorothioate
  modified_base 149: mod_base = OTHER; note = 2'O-methyl guanosine
taaaaacatggccccagcagcttgttgtagctcccgaaacgttgctacaataaggccgtctgaaaagatgtgccgcaacgctctgccccttaaagcttctgctttaaggggcatcgttatcgacgagaaagggactgaagctgctgggg

SEQ ID NO: 24498 - RNA, 148 nt, synthetic construct
  source 1..148: mol_type = other RNA
  modified_base 1: mod_base = OTHER; note = 2'O-methyl uridine phosphorothioate
  modified_base 2: mod_base = OTHER; note = 2'O-methyl adenosine phosphorothioate
  modified_base 3: mod_base = OTHER; note = 2'O-methyl adenosine phosphorothioate
  modified_base 145: mod_base = OTHER; note = uridine phosphorothioate
  modified_base 146: mod_base = OTHER; note = 2'O-methyl guanosine phosphorothioate
  modified_base 147: mod_base = OTHER; note = 2'O-methyl guanosine phosphorothioate
  modified_base 148: mod_base = OTHER; note = 2'O-methyl guanosine
taaaaacatggccccagcagcttgttgtagctcccgaaacgttgctacaataaggccgtctgaaaagatgtgccgcaacgctctgccccttaaagcttctgctttaaggggcatcgttatcgacgagaaagggactgaagctgctggg

SEQ ID NO: 24499 - RNA, 156 nt, synthetic construct
  source 1..156: mol_type = other RNA
  modified_base 1: mod_base = OTHER; note = 2'O-methyl uridine phosphorothioate
  modified_base 2: mod_base = OTHER; note = 2'O-methyl adenosine phosphorothioate
  modified_base 3: mod_base = OTHER; note = 2'O-methyl adenosine phosphorothioate
  modified_base 153: mod_base = OTHER; note = guanosine phosphorothioate
  modified_base 154: mod_base = OTHER; note = 2'O-methyl uridine phosphorothioate
  modified_base 155: mod_base = OTHER; note = 2'O-methyl uridine phosphorothioate
  modified_base 156: mod_base = OTHER; note = 2'O-methyl uridine
taaaaacatggccccagcagcttgttgtagctcccgaaacgttgctacaataaggccgtctgaaaagatgtgccgcaacgctctgccccttaaagcttctgctttaaggggcatcgtttcgacgagaaagggactgaagctgctggggccatgttt

SEQ ID NO: 24500 - RNA, 155 nt, synthetic construct
  source 1..155: mol_type = other RNA
  modified_base 1: mod_base = OTHER; note = 2'O-methyl uridine phosphorothioate
  modified_base 2: mod_base = OTHER; note = 2'O-methyl adenosine phosphorothioate
  modified_base 3: mod_base = OTHER; note = 2'O-methyl adenosine phosphorothioate
  modified_base 152: mod_base = OTHER; note = uridine phosphorothioate
  modified_base 153: mod_base = OTHER; note = 2'O-methyl guanosine phosphorothioate
  modified_base 154: mod_base = OTHER; note = 2'O-methyl uridine phosphorothioate
  modified_base 155: mod_base = OTHER; note = 2'O-methyl uridine
taaaaacatggccccagcagcttgttgtagctcccgaaacgttgctacaataaggccgtctgaaaagatgtgccgcaacgctctgccccttaaagcttctgctttaaggggcatcgtttcgacgagaaagggactgaagctgctggggccatgtt

SEQ ID NO: 24501 - RNA, 154 nt, synthetic construct
  source 1..154: mol_type = other RNA
  modified_base 1: mod_base = OTHER; note = 2'O-methyl uridine phosphorothioate
  modified_base 2: mod_base = OTHER; note = 2'O-methyl adenosine phosphorothioate
  modified_base 3: mod_base = OTHER; note = 2'O-methyl adenosine phosphorothioate
  modified_base 151: mod_base = OTHER; note = adenosine phosphorothioate
  modified_base 152: mod_base = OTHER; note = 2'O-methyl uridine phosphorothioate
  modified_base 153: mod_base = OTHER; note = 2'O-methyl guanosine phosphorothioate
  modified_base 154: mod_base = OTHER; note = 2'O-methyl uridine
taaaaacatggccccagcagcttgttgtagctcccgaaacgttgctacaataaggccgtctgaaaagatgtgccgcaacgctctgccccttaaagcttctgctttaaggggcatcgtttcgacgagaaagggactgaagctgctggggccatgt

SEQ ID NO: 24502 - RNA, 153 nt, synthetic construct
  source 1..153: mol_type = other RNA
  modified_base 1: mod_base = OTHER; note = 2'O-methyl uridine phosphorothioate
  modified_base 2: mod_base = OTHER; note = 2'O-methyl adenosine phosphorothioate
  modified_base 3: mod_base = OTHER; note = 2'O-methyl adenosine phosphorothioate
  modified_base 150: mod_base = OTHER; note = cytidine phosphorothioate
  modified_base 151: mod_base = OTHER; note = 2'O-methyl adenosine phosphorothioate
  modified_base 152: mod_base = OTHER; note = 2'O-methyl uridine phosphorothioate
  modified_base 153: mod_base = OTHER; note = 2'O-methyl guanosine
taaaaacatggccccagcagcttgttgtagctcccgaaacgttgctacaataaggccgtctgaaaagatgtgccgcaacgctctgccccttaaagcttctgctttaaggggcatcgtttcgacgagaaagggactgaagctgctggggccatg

SEQ ID NO: 24503 - RNA, 152 nt, synthetic construct
  source 1..152: mol_type = other RNA
  modified_base 1: mod_base = OTHER; note = 2'O-methyl uridine phosphorothioate
  modified_base 2: mod_base = OTHER; note = 2'O-methyl adenosine phosphorothioate
  modified_base 3: mod_base = OTHER; note = 2'O-methyl adenosine phosphorothioate
  modified_base 149: mod_base = OTHER; note = cytidine phosphorothioate
  modified_base 150: mod_base = OTHER; note = 2'O-methyl cytidine phosphorothioate
  modified_base 151: mod_base = OTHER; note = 2'O-methyl adenosine phosphorothioate
  modified_base 152: mod_base = OTHER; note = 2'O-methyl uridine
taaaaacatggccccagcagcttgttgtagctcccgaaacgttgctacaataaggccgtctgaaaagatgtgccgcaacgctctgccccttaaagcttctgctttaaggggcatcgtttcgacgagaaagggactgaagctgctggggccat

SEQ ID NO: 24504 - RNA, 151 nt, synthetic construct
  source 1..151: mol_type = other RNA
  modified_base 1: mod_base = OTHER; note = 2'O-methyl uridine phosphorothioate
  modified_base 2: mod_base = OTHER; note = 2'O-methyl adenosine phosphorothioate
  modified_base 3: mod_base = OTHER; note = 2'O-methyl adenosine phosphorothioate
  modified_base 148: mod_base = OTHER; note = guanosine phosphorothioate
  modified_base 149: mod_base = OTHER; note = 2'O-methyl cytidine phosphorothioate
  modified_base 150: mod_base = OTHER; note = 2'O-methyl cytidine phosphorothioate
  modified_base 151: mod_base = OTHER; note = 2'O-methyl adenosine
taaaaacatggccccagcagcttgttgtagctcccgaaacgttgctacaataaggccgtctgaaaagatgtgccgcaacgctctgccccttaaagcttctgctttaaggggcatcgtttcgacgagaaagggactgaagctgctggggcca

SEQ ID NO: 24505 - RNA, 150 nt, synthetic construct
  source 1..150: mol_type = other RNA
  modified_base 1: mod_base = OTHER; note = 2'O-methyl uridine phosphorothioate
  modified_base 2: mod_base = OTHER; note = 2'O-methyl adenosine phosphorothioate
  modified_base 3: mod_base = OTHER; note = 2'O-methyl adenosine phosphorothioate
  modified_base 147: mod_base = OTHER; note = guanosine phosphorothioate
  modified_base 148: mod_base = OTHER; note = 2'O-methyl guanosine phosphorothioate
  modified_base 149: mod_base = OTHER; note = 2'O-methyl cytidine phosphorothioate
  modified_base 150: mod_base = OTHER; note = 2'O-methyl cytidine
taaaaacatggccccagcagcttgttgtagctcccgaaacgttgctacaataaggccgtctgaaaagatgtgccgcaacgctctgccccttaaagcttctgctttaaggggcatcgtttcgacgagaaagggactgaagctgctggggcc

SEQ ID NO: 24506 - RNA, 149 nt, synthetic construct
  source 1..149: mol_type = other RNA
  modified_base 1: mod_base = OTHER; note = 2'O-methyl uridine phosphorothioate
  modified_base 2: mod_base = OTHER; note = 2'O-methyl adenosine phosphorothioate
  modified_base 3: mod_base = OTHER; note = 2'O-methyl adenosine phosphorothioate
  modified_base 146: mod_base = OTHER; note = guanosine phosphorothioate
  modified_base 147: mod_base = OTHER; note = 2'O-methyl guanosine phosphorothioate
  modified_base 148: mod_base = OTHER; note = 2'O-methyl guanosine phosphorothioate
  modified_base 149: mod_base = OTHER; note = 2'O-methyl cytidine
taaaaacatggccccagcagcttgttgtagctcccgaaacgttgctacaataaggccgtctgaaaagatgtgccgcaacgctctgccccttaaagcttctgctttaaggggcatcgtttcgacgagaaagggactgaagctgctggggc

SEQ ID NO: 24507 - RNA, 148 nt, synthetic construct
  source 1..148: mol_type = other RNA
  modified_base 1: mod_base = OTHER; note = 2'O-methyl uridine phosphorothioate
  modified_base 2: mod_base = OTHER; note = 2'O-methyl adenosine phosphorothioate
  modified_base 3: mod_base = OTHER; note = 2'O-methyl adenosine phosphorothioate
  modified_base 145: mod_base = OTHER; note = guanosine phosphorothioate
  modified_base 146: mod_base = OTHER; note = 2'O-methyl guanosine phosphorothioate
  modified_base 147: mod_base = OTHER; note = 2'O-methyl guanosine phosphorothioate
  modified_base 148: mod_base = OTHER; note = 2'O-methyl guanosine
taaaaacatggccccagcagcttgttgtagctcccgaaacgttgctacaataaggccgtctgaaaagatgtgccgcaacgctctgccccttaaagcttctgctttaaggggcatcgtttcgacgagaaagggactgaagctgctgggg

SEQ ID NO: 24508 - RNA, 147 nt, synthetic construct
  source 1..147: mol_type = other RNA
  modified_base 1: mod_base = OTHER; note = 2'O-methyl uridine phosphorothioate
  modified_base 2: mod_base = OTHER; note = 2'O-methyl adenosine phosphorothioate
  modified_base 3: mod_base = OTHER; note = 2'O-methyl adenosine phosphorothioate
  modified_base 144: mod_base = OTHER; note = uridine phosphorothioate
  modified_base 145: mod_base = OTHER; note = 2'O-methyl guanosine phosphorothioate
  modified_base 146: mod_base = OTHER; note = 2'O-methyl guanosine phosphorothioate
  modified_base 147: mod_base = OTHER; note = 2'O-methyl guanosine
taaaaacatggccccagcagcttgttgtagctcccgaaacgttgctacaataaggccgtctgaaaagatgtgccgcaacgctctgccccttaaagcttctgctttaaggggcatcgtttcgacgagaaagggactgaagctgctggg

SEQ ID NO: 24509 - RNA, 154 nt, synthetic construct
  source 1..154: mol_type = other RNA
  modified_base 1: mod_base = OTHER; note = 2'O-methyl uridine phosphorothioate
  modified_base 2: mod_base = OTHER; note = 2'O-methyl adenosine phosphorothioate
  modified_base 3: mod_base = OTHER; note = 2'O-methyl adenosine phosphorothioate
  modified_base 151: mod_base = OTHER; note = guanosine phosphorothioate
  modified_base 152: mod_base = OTHER; note = 2'O-methyl uridine phosphorothioate
  modified_base 153: mod_base = OTHER; note = 2'O-methyl uridine phosphorothioate
  modified_base 154: mod_base = OTHER; note = 2'O-methyl uridine
taaaaacatggccccagcagcttgttgtagctcccgaaacgttgctacaataaggccgtctgaaaagatgtgccgcaacgctctgccccttaaagcttctgctttaaggggcatcgttgacgagaaagggactgaagctgctggggccatgttt

SEQ ID NO: 24510 - RNA, 153 nt, synthetic construct
  source 1..153: mol_type = other RNA
  modified_base 1: mod_base = OTHER; note = 2'O-methyl uridine phosphorothioate
  modified_base 2: mod_base = OTHER; note = 2'O-methyl adenosine phosphorothioate
  modified_base 3: mod_base = OTHER; note = 2'O-methyl adenosine phosphorothioate
  modified_base 150: mod_base = OTHER; note = uridine phosphorothioate
  modified_base 151: mod_base = OTHER; note = 2'O-methyl guanosine phosphorothioate
  modified_base 152: mod_base = OTHER; note = 2'O-methyl uridine phosphorothioate
  modified_base 153: mod_base = OTHER; note = 2'O-methyl uridine
taaaaacatggccccagcagcttgttgtagctcccgaaacgttgctacaataaggccgtctgaaaagatgtgccgcaacgctctgccccttaaagcttctgctttaaggggcatcgttgacgagaaagggactgaagctgctggggccatgtt

SEQ ID NO: 24511 - RNA, 152 nt, synthetic construct
  source 1..152: mol_type = other RNA
  modified_base 1: mod_base = OTHER; note = 2'O-methyl uridine phosphorothioate
  modified_base 2: mod_base = OTHER; note = 2'O-methyl adenosine phosphorothioate
  modified_base 3: mod_base = OTHER; note = 2'O-methyl adenosine phosphorothioate
  modified_base 149: mod_base = OTHER; note = adenosine phosphorothioate
  modified_base 150: mod_base = OTHER; note = 2'O-methyl uridine phosphorothioate
  modified_base 151: mod_base = OTHER; note = 2'O-methyl guanosine phosphorothioate
  modified_base 152: mod_base = OTHER; note = 2'O-methyl uridine
taaaaacatggccccagcagcttgttgtagctcccgaaacgttgctacaataaggccgtctgaaaagatgtgccgcaacgctctgccccttaaagcttctgctttaaggggcatcgttgacgagaaagggactgaagctgctggggccatgt

SEQ ID NO: 24512 - RNA, 151 nt, synthetic construct
  source 1..151: mol_type = other RNA
  modified_base 1: mod_base = OTHER; note = 2'O-methyl uridine phosphorothioate
  modified_base 2: mod_base = OTHER; note = 2'O-methyl adenosine phosphorothioate
  modified_base 3: mod_base = OTHER; note = 2'O-methyl adenosine phosphorothioate
  modified_base 148: mod_base = OTHER; note = cytidine phosphorothioate
  modified_base 149: mod_base = OTHER; note = 2'O-methyl adenosine phosphorothioate
  modified_base 150: mod_base = OTHER; note = 2'O-methyl uridine phosphorothioate
  modified_base 151: mod_base = OTHER; note = 2'O-methyl guanosine
taaaaacatggccccagcagcttgttgtagctcccgaaacgttgctacaataaggccgtctgaaaagatgtgccgcaacgctctgccccttaaagcttctgctttaaggggcatcgttgacgagaaagggactgaagctgctggggccatg

SEQ ID NO: 24513 - RNA, 150 nt, synthetic construct
  source 1..150: mol_type = other RNA
  modified_base 1: mod_base = OTHER; note = 2'O-methyl uridine phosphorothioate
  modified_base 2: mod_base = OTHER; note = 2'O-methyl adenosine phosphorothioate
  modified_base 3: mod_base = OTHER; note = 2'O-methyl adenosine phosphorothioate
  modified_base 147: mod_base = OTHER; note = cytidine phosphorothioate
  modified_base 148: mod_base = OTHER; note = 2'O-methyl cytidine phosphorothioate
  modified_base 149: mod_base = OTHER; note = 2'O-methyl adenosine phosphorothioate
  modified_base 150: mod_base = OTHER; note = 2'O-methyl uridine
taaaaacatggccccagcagcttgttgtagctcccgaaacgttgctacaataaggccgtctgaaaagatgtgccgcaacgctctgccccttaaagcttctgctttaaggggcatcgttgacgagaaagggactgaagctgctggggccat

SEQ ID NO: 24514 - RNA, 149 nt, synthetic construct
  source 1..149: mol_type = other RNA
  modified_base 1: mod_base = OTHER; note = 2'O-methyl uridine phosphorothioate
  modified_base 2: mod_base = OTHER; note = 2'O-methyl adenosine phosphorothioate
  modified_base 3: mod_base = OTHER; note = 2'O-methyl adenosine phosphorothioate
  modified_base 146: mod_base = OTHER; note = guanosine phosphorothioate
  modified_base 147: mod_base = OTHER; note = 2'O-methyl cytidine phosphorothioate
  modified_base 148: mod_base = OTHER; note = 2'O-methyl cytidine phosphorothioate
  modified_base 149: mod_base = OTHER; note = 2'O-methyl adenosine
taaaaacatggccccagcagcttgttgtagctcccgaaacgttgctacaataaggccgtctgaaaagatgtgccgcaacgctctgccccttaaagcttctgctttaaggggcatcgttgacgagaaagggactgaagctgctggggcca

SEQ ID NO: 24515 - RNA, 148 nt, synthetic construct
  source 1..148: mol_type = other RNA
  modified_base 1: mod_base = OTHER; note = 2'O-methyl uridine phosphorothioate
  modified_base 2: mod_base = OTHER; note = 2'O-methyl adenosine phosphorothioate
  modified_base 3: mod_base = OTHER; note = 2'O-methyl adenosine phosphorothioate
  modified_base 145: mod_base = OTHER; note = guanosine phosphorothioate
  modified_base 146: mod_base = OTHER; note = 2'O-methyl guanosine phosphorothioate
  modified_base 147: mod_base = OTHER; note = 2'O-methyl cytidine phosphorothioate
  modified_base 148: mod_base = OTHER; note = 2'O-methyl cytidine
taaaaacatggccccagcagcttgttgtagctcccgaaacgttgctacaataaggccgtctgaaaagatgtgccgcaacgctctgccccttaaagcttctgctttaaggggcatcgttgacgagaaagggactgaagctgctggggcc

SEQ ID NO: 24516 - RNA, 147 nt, synthetic construct
  source 1..147: mol_type = other RNA
  modified_base 1: mod_base = OTHER; note = 2'O-methyl uridine phosphorothioate
  modified_base 2: mod_base = OTHER; note = 2'O-methyl adenosine phosphorothioate
  modified_base 3: mod_base = OTHER; note = 2'O-methyl adenosine phosphorothioate
  modified_base 144: mod_base = OTHER; note = guanosine phosphorothioate
  modified_base 145: mod_base = OTHER; note = 2'O-methyl guanosine phosphorothioate
  modified_base 146: mod_base = OTHER; note = 2'O-methyl guanosine phosphorothioate
  modified_base 147: mod_base = OTHER; note = 2'O-methyl cytidine
taaaaacatggccccagcagcttgttgtagctcccgaaacgttgctacaataaggccgtctgaaaagatgtgccgcaacgctctgccccttaaagcttctgctttaaggggcatcgttgacgagaaagggactgaagctgctggggc

SEQ ID NO: 24517 - RNA, 146 nt, synthetic construct
  source 1..146: mol_type = other RNA
  modified_base 1: mod_base = OTHER; note = 2'O-methyl uridine phosphorothioate
  modified_base 2: mod_base = OTHER; note = 2'O-methyl adenosine phosphorothioate
  modified_base 3: mod_base = OTHER; note = 2'O-methyl adenosine phosphorothioate
  modified_base 143: mod_base = OTHER; note = guanosine phosphorothioate
  modified_base 144: mod_base = OTHER; note = 2'O-methyl guanosine phosphorothioate
  modified_base 145: mod_base = OTHER; note = 2'O-methyl guanosine phosphorothioate
  modified_base 146: mod_base = OTHER; note = 2'O-methyl guanosine
taaaaacatggccccagcagcttgttgtagctcccgaaacgttgctacaataaggccgtctgaaaagatgtgccgcaacgctctgccccttaaagcttctgctttaaggggcatcgttgacgagaaagggactgaagctgctgggg

SEQ ID NO: 24518 - RNA, 145 nt, synthetic construct
  source 1..145: mol_type = other RNA
  modified_base 1: mod_base = OTHER; note = 2'O-methyl uridine phosphorothioate
  modified_base 2: mod_base = OTHER; note = 2'O-methyl adenosine phosphorothioate
  modified_base 3: mod_base = OTHER; note = 2'O-methyl adenosine phosphorothioate
  modified_base 142: mod_base = OTHER; note = uridine phosphorothioate
  modified_base 143: mod_base = OTHER; note = 2'O-methyl guanosine phosphorothioate
  modified_base 144: mod_base = OTHER; note = 2'O-methyl guanosine phosphorothioate
  modified_base 145: mod_base = OTHER; note = 2'O-methyl guanosine
taaaaacatggccccagcagcttgttgtagctcccgaaacgttgctacaataaggccgtctgaaaagatgtgccgcaacgctctgccccttaaagcttctgctttaaggggcatcgttgacgagaaagggactgaagctgctggg

SEQ ID NO: 24519 - RNA, 159 nt, synthetic construct
  source 1..159: mol_type = other RNA
  modified_base 1: mod_base = OTHER; note = 2'O-methyl adenosine phosphorothioate
  modified_base 2: mod_base = OTHER; note = 2'O-methyl guanosine phosphorothioate
  modified_base 3: mod_base = OTHER; note = 2'O-methyl guanosine phosphorothioate
  modified_base 156: mod_base = OTHER; note = guanosine phosphorothioate
  modified_base 157: mod_base = OTHER; note = 2'O-methyl cytidine phosphorothioate
  modified_base 158: mod_base = OTHER; note = 2'O-methyl cytidine phosphorothioate
  modified_base 159: mod_base = OTHER; note = 2'O-methyl uridine
aggccgtgcataaggctgtggttttagagctagaaatagcaagttaaaataaggctagtccgttatcaacttgaaaaagtggcaccgagtcggtgcacatggccccagcagcttcagtccctttctcgtcgatggtcagcacagccttatgcacggcct

SEQ ID NO: 24520 - RNA, 158 nt, synthetic construct
  source 1..158: mol_type = other RNA
  modified_base 1: mod_base = OTHER; note = 2'O-methyl adenosine phosphorothioate
  modified_base 2: mod_base = OTHER; note = 2'O-methyl guanosine phosphorothioate
  modified_base 3: mod_base = OTHER; note = 2'O-methyl guanosine phosphorothioate
  modified_base 155: mod_base = OTHER; note = guanosine phosphorothioate
  modified_base 156: mod_base = OTHER; note = 2'O-methyl guanosine phosphorothioate
  modified_base 157: mod_base = OTHER; note = 2'O-methyl cytidine phosphorothioate
  modified_base 158: mod_base = OTHER; note = 2'O-methyl cytidine
aggccgtgcataaggctgtggttttagagctagaaatagcaagttaaaataaggctagtccgttatcaacttgaaaaagtggcaccgagtcggtgcacatggccccagcagcttcagtccctttctcgtcgatggtcagcacagccttatgcacggcc

SEQ ID NO: 24521 - RNA, 157 nt, synthetic construct
  source 1..157: mol_type = other RNA
  modified_base 1: mod_base = OTHER; note = 2'O-methyl adenosine phosphorothioate
  modified_base 2: mod_base = OTHER; note = 2'O-methyl guanosine phosphorothioate
  modified_base 3: mod_base = OTHER; note = 2'O-methyl guanosine phosphorothioate
  modified_base 154: mod_base = OTHER; note = cytidine phosphorothioate
  modified_base 155: mod_base = OTHER; note = 2'O-methyl guanosine phosphorothioate
  modified_base 156: mod_base = OTHER; note = 2'O-methyl guanosine phosphorothioate
  modified_base 157: mod_base = OTHER; note = 2'O-methyl cytidine
aggccgtgcataaggctgtggttttagagctagaaatagcaagttaaaataaggctagtccgttatcaacttgaaaaagtggcaccgagtcggtgcacatggccccagcagcttcagtccctttctcgtcgatggtcagcacagccttatgcacggc

SEQ ID NO: 24522 - RNA, 156 nt, synthetic construct
  source 1..156: mol_type = other RNA
  modified_base 1: mod_base = OTHER; note = 2'O-methyl adenosine phosphorothioate
  modified_base 2: mod_base = OTHER; note = 2'O-methyl guanosine phosphorothioate
  modified_base 3: mod_base = OTHER; note = 2'O-methyl guanosine phosphorothioate
  modified_base 153: mod_base = OTHER; note = adenosine phosphorothioate
  modified_base 154: mod_base = OTHER; note = 2'O-methyl cytidine phosphorothioate
  modified_base 155: mod_base = OTHER; note = 2'O-methyl guanosine phosphorothioate
  modified_base 156: mod_base = OTHER; note = 2'O-methyl guanosine
aggccgtgcataaggctgtggttttagagctagaaatagcaagttaaaataaggctagtccgttatcaacttgaaaaagtggcaccgagtcggtgcacatggccccagcagcttcagtccctttctcgtcgatggtcagcacagccttatgcacgg

SEQ ID NO: 24523 - RNA, 155 nt, synthetic construct
  source 1..155: mol_type = other RNA
  modified_base 1: mod_base = OTHER; note = 2'O-methyl adenosine phosphorothioate
  modified_base 2: mod_base = OTHER; note = 2'O-methyl guanosine phosphorothioate
  modified_base 3: mod_base = OTHER; note = 2'O-methyl guanosine phosphorothioate
  modified_base 152: mod_base = OTHER; note = cytidine phosphorothioate
  modified_base 153: mod_base = OTHER; note = 2'O-methyl adenosine phosphorothioate
  modified_base 154: mod_base = OTHER; note = 2'O-methyl cytidine phosphorothioate
  modified_base 155: mod_base = OTHER; note = 2'O-methyl guanosine
aggccgtgcataaggctgtggttttagagctagaaatagcaagttaaaataaggctagtccgttatcaacttgaaaaagtggcaccgagtcggtgcacatggccccagcagcttcagtccctttctcgtcgatggtcagcacagccttatgcacg

SEQ ID NO: 24524 - RNA, 154 nt, synthetic construct
  source 1..154: mol_type = other RNA
  modified_base 1: mod_base = OTHER; note = 2'O-methyl adenosine phosphorothioate
  modified_base 2: mod_base = OTHER; note = 2'O-methyl guanosine phosphorothioate
  modified_base 3: mod_base = OTHER; note = 2'O-methyl guanosine phosphorothioate
  modified_base 151: mod_base = OTHER; note = guanosine phosphorothioate
  modified_base 152: mod_base = OTHER; note = 2'O-methyl cytidine phosphorothioate
  modified_base 153: mod_base = OTHER; note = 2'O-methyl adenosine phosphorothioate
  modified_base 154: mod_base = OTHER; note = 2'O-methyl cytidine
aggccgtgcataaggctgtggttttagagctagaaatagcaagttaaaataaggctagtccgttatcaacttgaaaaagtggcaccgagtcggtgcacatggccccagcagcttcagtccctttctcgtcgatggtcagcacagccttatgcac

SEQ ID NO: 24525 - RNA, 153 nt, synthetic construct
  source 1..153: mol_type = other RNA
  modified_base 1: mod_base = OTHER; note = 2'O-methyl adenosine phosphorothioate
  modified_base 2: mod_base = OTHER; note = 2'O-methyl guanosine phosphorothioate
  modified_base 3: mod_base = OTHER; note = 2'O-methyl guanosine phosphorothioate
  modified_base 150: mod_base = OTHER; note = uridine phosphorothioate
  modified_base 151: mod_base = OTHER; note = 2'O-methyl guanosine phosphorothioate
  modified_base 152: mod_base = OTHER; note = 2'O-methyl cytidine phosphorothioate
  modified_base 153: mod_base = OTHER; note = 2'O-methyl adenosine
aggccgtgcataaggctgtggttttagagctagaaatagcaagttaaaataaggctagtccgttatcaacttgaaaaagtggcaccgagtcggtgcacatggccccagcagcttcagtccctttctcgtcgatggtcagcacagccttatgca

SEQ ID NO: 24526 - RNA, 152 nt, synthetic construct
  source 1..152: mol_type = other RNA
  modified_base 1: mod_base = OTHER; note = 2'O-methyl adenosine phosphorothioate
  modified_base 2: mod_base = OTHER; note = 2'O-methyl guanosine phosphorothioate
  modified_base 3: mod_base = OTHER; note = 2'O-methyl guanosine phosphorothioate
  modified_base 149: mod_base = OTHER; note = adenosine phosphorothioate
  modified_base 150: mod_base = OTHER; note = 2'O-methyl uridine phosphorothioate
  modified_base 151: mod_base = OTHER; note = 2'O-methyl guanosine phosphorothioate
  modified_base 152: mod_base = OTHER; note = 2'O-methyl cytidine
aggccgtgcataaggctgtggttttagagctagaaatagcaagttaaaataaggctagtccgttatcaacttgaaaaagtggcaccgagtcggtgcacatggccccagcagcttcagtccctttctcgtcgatggtcagcacagccttatgc

SEQ ID NO: 24527 - RNA, 151 nt, synthetic construct
  source 1..151: mol_type = other RNA
  modified_base 1: mod_base = OTHER; note = 2'O-methyl adenosine phosphorothioate
  modified_base 2: mod_base = OTHER; note = 2'O-methyl guanosine phosphorothioate
  modified_base 3: mod_base = OTHER; note = 2'O-methyl guanosine phosphorothioate
  modified_base 148: mod_base = OTHER; note = uridine phosphorothioate
  modified_base 149: mod_base = OTHER; note = 2'O-methyl adenosine phosphorothioate
  modified_base 150: mod_base = OTHER; note = 2'O-methyl uridine phosphorothioate
  modified_base 151: mod_base = OTHER; note = 2'O-methyl guanosine
aggccgtgcataaggctgtggttttagagctagaaatagcaagttaaaataaggctagtccgttatcaacttgaaaaagtggcaccgagtcggtgcacatggccccagcagcttcagtccctttctcgtcgatggtcagcacagccttatg

SEQ ID NO: 24528 - RNA, 150 nt, synthetic construct
  source 1..150: mol_type = other RNA
  modified_base 1: mod_base = OTHER; note = 2'O-methyl adenosine phosphorothioate
  modified_base 2: mod_base = OTHER; note = 2'O-methyl guanosine phosphorothioate
  modified_base 3: mod_base = OTHER; note = 2'O-methyl guanosine phosphorothioate
  modified_base 147: mod_base = OTHER; note = uridine phosphorothioate
  modified_base 148: mod_base = OTHER; note = 2'O-methyl uridine phosphorothioate
  modified_base 149: mod_base = OTHER; note = 2'O-methyl adenosine phosphorothioate
  modified_base 150: mod_base = OTHER; note = 2'O-methyl uridine
aggccgtgcataaggctgtggttttagagctagaaatagcaagttaaaataaggctagtccgttatcaacttgaaaaagtggcaccgagtcggtgcacatggccccagcagcttcagtccctttctcgtcgatggtcagcacagccttat

SEQ ID NO: 24529 - RNA, 154 nt, synthetic construct
  source 1..154: mol_type = other RNA
  modified_base 1: mod_base = OTHER; note = 2'O-methyl adenosine phosphorothioate
  modified_base 2: mod_base = OTHER; note = 2'O-methyl guanosine phosphorothioate
  modified_base 3: mod_base = OTHER; note = 2'O-methyl guanosine phosphorothioate
  modified_base 151: mod_base = OTHER; note = guanosine phosphorothioate
  modified_base 152: mod_base = OTHER; note = 2'O-methyl cytidine phosphorothioate
  modified_base 153: mod_base = OTHER; note = 2'O-methyl cytidine phosphorothioate
  modified_base 154: mod_base = OTHER; note = 2'O-methyl uridine
aggccgtgcataaggctgtggttttagagctagaaatagcaagttaaaataaggctagtccgttatcaacttgaaaaagtggcaccgagtcggtgcgccccagcagcttcagtccctttctcgtcgatggtcagcacagccttatgcacggcct

SEQ ID NO: 24530 - RNA, 153 nt, synthetic construct
  source 1..153: mol_type = other RNA
  modified_base 1: mod_base = OTHER; note = 2'O-methyl adenosine phosphorothioate
  modified_base 2: mod_base = OTHER; note = 2'O-methyl guanosine phosphorothioate
  modified_base 3: mod_base = OTHER; note = 2'O-methyl guanosine phosphorothioate
  modified_base 150: mod_base = OTHER; note = guanosine phosphorothioate
  modified_base 151: mod_base = OTHER; note = 2'O-methyl guanosine phosphorothioate
  modified_base 152: mod_base = OTHER; note = 2'O-methyl cytidine phosphorothioate
  modified_base 153: mod_base = OTHER; note = 2'O-methyl cytidine
aggccgtgcataaggctgtggttttagagctagaaatagcaagttaaaataaggctagtccgttatcaacttgaaaaagtggcaccgagtcggtgcgccccagcagcttcagtccctttctcgtcgatggtcagcacagccttatgcacggcc

SEQ ID NO: 24531 - RNA, 152 nt, synthetic construct
  source 1..152: mol_type = other RNA
  modified_base 1: mod_base = OTHER; note = 2'O-methyl adenosine phosphorothioate
  modified_base 2: mod_base = OTHER; note = 2'O-methyl guanosine phosphorothioate
  modified_base 3: mod_base = OTHER; note = 2'O-methyl guanosine phosphorothioate
  modified_base 149: mod_base = OTHER; note = cytidine phosphorothioate
  modified_base 150: mod_base = OTHER; note = 2'O-methyl guanosine phosphorothioate
  modified_base 151: mod_base = OTHER; note = 2'O-methyl guanosine phosphorothioate
  modified_base 152: mod_base = OTHER; note = 2'O-methyl cytidine
aggccgtgcataaggctgtggttttagagctagaaatagcaagttaaaataaggctagtccgttatcaacttgaaaaagtggcaccgagtcggtgcgccccagcagcttcagtccctttctcgtcgatggtcagcacagccttatgcacggc

SEQ ID NO: 24532 - RNA, 151 nt, synthetic construct
  source 1..151: mol_type = other RNA
  modified_base 1: mod_base = OTHER; note = 2'O-methyl adenosine phosphorothioate
  modified_base 2: mod_base = OTHER; note = 2'O-methyl guanosine phosphorothioate
  modified_base 3: mod_base = OTHER; note = 2'O-methyl guanosine phosphorothioate
  modified_base 148: mod_base = OTHER; note = adenosine phosphorothioate
  modified_base 149: mod_base = OTHER; note = 2'O-methyl cytidine phosphorothioate
  modified_base 150: mod_base = OTHER; note = 2'O-methyl guanosine phosphorothioate
  modified_base 151: mod_base = OTHER; note = 2'O-methyl guanosine
aggccgtgcataaggctgtggttttagagctagaaatagcaagttaaaataaggctagtccgttatcaacttgaaaaagtggcaccgagtcggtgcgccccagcagcttcagtccctttctcgtcgatggtcagcacagccttatgcacgg

SEQ ID NO: 24533 - RNA, 150 nt, synthetic construct
  source 1..150: mol_type = other RNA
  modified_base 1: mod_base = OTHER; note = 2'O-methyl adenosine phosphorothioate
  modified_base 2: mod_base = OTHER; note = 2'O-methyl guanosine phosphorothioate
  modified_base 3: mod_base = OTHER; note = 2'O-methyl guanosine phosphorothioate
  modified_base 147: mod_base = OTHER; note = cytidine phosphorothioate
  modified_base 148: mod_base = OTHER; note = 2'O-methyl adenosine phosphorothioate
  modified_base 149: mod_base = OTHER; note = 2'O-methyl cytidine phosphorothioate
  modified_base 150: mod_base = OTHER; note = 2'O-methyl guanosine
aggccgtgcataaggctgtggttttagagctagaaatagcaagttaaaataaggctagtccgttatcaacttgaaaaagtggcaccgagtcggtgcgccccagcagcttcagtccctttctcgtcgatggtcagcacagccttatgcacg

SEQ ID NO: 24534 - RNA, 149 nt, synthetic construct
  source 1..149: mol_type = other RNA
  modified_base 1: mod_base = OTHER; note = 2'O-methyl adenosine phosphorothioate
  modified_base 2: mod_base = OTHER; note = 2'O-methyl guanosine phosphorothioate
  modified_base 3: mod_base = OTHER; note = 2'O-methyl guanosine phosphorothioate
  modified_base 146: mod_base = OTHER; note = guanosine phosphorothioate
  modified_base 147: mod_base = OTHER; note = 2'O-methyl cytidine phosphorothioate
  modified_base 148: mod_base = OTHER; note = 2'O-methyl adenosine phosphorothioate
  modified_base 149: mod_base = OTHER; note = 2'O-methyl cytidine
aggccgtgcataaggctgtggttttagagctagaaatagcaagttaaaataaggctagtccgttatcaacttgaaaaagtggcaccgagtcggtgcgccccagcagcttcagtccctttctcgtcgatggtcagcacagccttatgcac

SEQ ID NO: 24535 - RNA, 148 nt, synthetic construct
  source 1..148: mol_type = other RNA
  modified_base 1: mod_base = OTHER; note = 2'O-methyl adenosine phosphorothioate
  modified_base 2: mod_base = OTHER; note = 2'O-methyl guanosine phosphorothioate
  modified_base 3: mod_base = OTHER; note = 2'O-methyl guanosine phosphorothioate
  modified_base 145: mod_base = OTHER; note = uridine phosphorothioate
  modified_base 146: mod_base = OTHER; note = 2'O-methyl guanosine phosphorothioate
  modified_base 147: mod_base = OTHER; note = 2'O-methyl cytidine phosphorothioate
  modified_base 148: mod_base = OTHER; note = 2'O-methyl adenosine
aggccgtgcataaggctgtggttttagagctagaaatagcaagttaaaataaggctagtccgttatcaacttgaaaaagtggcaccgagtcggtgcgccccagcagcttcagtccctttctcgtcgatggtcagcacagccttatgca

SEQ ID NO: 24536 - RNA, 147 nt, synthetic construct
  source 1..147: mol_type = other RNA
  modified_base 1: mod_base = OTHER; note = 2'O-methyl adenosine phosphorothioate
  modified_base 2: mod_base = OTHER; note = 2'O-methyl guanosine phosphorothioate
  modified_base 3: mod_base = OTHER; note = 2'O-methyl guanosine phosphorothioate
  modified_base 144: mod_base = OTHER; note = adenosine phosphorothioate
  modified_base 145: mod_base = OTHER; note = 2'O-methyl uridine phosphorothioate
  modified_base 146: mod_base = OTHER; note = 2'O-methyl guanosine phosphorothioate
  modified_base 147: mod_base = OTHER; note = 2'O-methyl cytidine
aggccgtgcataaggctgtggttttagagctagaaatagcaagttaaaataaggctagtccgttatcaacttgaaaaagtggcaccgagtcggtgcgccccagcagcttcagtccctttctcgtcgatggtcagcacagccttatgc

SEQ ID NO: 24537 - RNA, 146 nt, synthetic construct
  source 1..146: mol_type = other RNA
  modified_base 1: mod_base = OTHER; note = 2'O-methyl adenosine phosphorothioate
  modified_base 2: mod_base = OTHER; note = 2'O-methyl guanosine phosphorothioate
  modified_base 3: mod_base = OTHER; note = 2'O-methyl guanosine phosphorothioate
  modified_base 143: mod_base = OTHER; note = uridine phosphorothioate
  modified_base 144: mod_base = OTHER; note = 2'O-methyl adenosine phosphorothioate
  modified_base 145: mod_base = OTHER; note = 2'O-methyl uridine phosphorothioate
  modified_base 146: mod_base = OTHER; note = 2'O-methyl guanosine
aggccgtgcataaggctgtggttttagagctagaaatagcaagttaaaataaggctagtccgttatcaacttgaaaaagtggcaccgagtcggtgcgccccagcagcttcagtccctttctcgtcgatggtcagcacagccttatg

SEQ ID NO: 24538 - RNA, 145 nt, synthetic construct
  source 1..145: mol_type = other RNA
  modified_base 1: mod_base = OTHER; note = 2'O-methyl adenosine phosphorothioate
  modified_base 2: mod_base = OTHER; note = 2'O-methyl guanosine phosphorothioate
  modified_base 3: mod_base = OTHER; note = 2'O-methyl guanosine phosphorothioate
  modified_base 142: mod_base = OTHER; note = uridine phosphorothioate
  modified_base 143: mod_base = OTHER; note = 2'O-methyl uridine phosphorothioate
  modified_base 144: mod_base = OTHER; note = 2'O-methyl adenosine phosphorothioate
  modified_base 145: mod_base = OTHER; note = 2'O-methyl uridine
aggccgtgcataaggctgtggttttagagctagaaatagcaagttaaaataaggctagtccgttatcaacttgaaaaagtggcaccgagtcggtgcgccccagcagcttcagtccctttctcgtcgatggtcagcacagccttat

SEQ ID NO: 24539 - RNA, 149 nt, synthetic construct
  source 1..149: mol_type = other RNA
  modified_base 1: mod_base = OTHER; note = 2'O-methyl adenosine phosphorothioate
  modified_base 2: mod_base = OTHER; note = 2'O-methyl guanosine phosphorothioate
  modified_base 3: mod_base = OTHER; note = 2'O-methyl guanosine phosphorothioate
  modified_base 146: mod_base = OTHER; note = guanosine phosphorothioate
  modified_base 147: mod_base = OTHER; note = 2'O-methyl cytidine phosphorothioate
  modified_base 148: mod_base = OTHER; note = 2'O-methyl cytidine phosphorothioate
  modified_base 149: mod_base = OTHER; note = 2'O-methyl uridine
aggccgtgcataaggctgtggttttagagctagaaatagcaagttaaaataaggctagtccgttatcaacttgaaaaagtggcaccgagtcggtgcagcagcttcagtccctttctcgtcgatggtcagcacagccttatgcacggcct

SEQ ID NO: 24540 - RNA, 148 nt, synthetic construct
  source 1..148: mol_type = other RNA
  modified_base 1: mod_base = OTHER; note = 2'O-methyl adenosine phosphorothioate
  modified_base 2: mod_base = OTHER; note = 2'O-methyl guanosine phosphorothioate
  modified_base 3: mod_base = OTHER; note = 2'O-methyl guanosine phosphorothioate
  modified_base 145: mod_base = OTHER; note = guanosine phosphorothioate
  modified_base 146: mod_base = OTHER; note = 2'O-methyl guanosine phosphorothioate
  modified_base 147: mod_base = OTHER; note = 2'O-methyl cytidine phosphorothioate
  modified_base 148: mod_base = OTHER; note = 2'O-methyl cytidine
aggccgtgcataaggctgtggttttagagctagaaatagcaagttaaaataaggctagtccgttatcaacttgaaaaagtggcaccgagtcggtgcagcagcttcagtccctttctcgtcgatggtcagcacagccttatgcacggcc

SEQ ID NO: 24541 - RNA, 147 nt, synthetic construct
  source 1..147: mol_type = other RNA
  modified_base 1: mod_base = OTHER; note = 2'O-methyl adenosine phosphorothioate
  modified_base 2: mod_base = OTHER; note = 2'O-methyl guanosine phosphorothioate
  modified_base 3: mod_base = OTHER; note = 2'O-methyl guanosine phosphorothioate
  modified_base 144: mod_base = OTHER; note = cytidine phosphorothioate
  modified_base 145: mod_base = OTHER; note = 2'O-methyl guanosine phosphorothioate
  modified_base 146: mod_base = OTHER; note = 2'O-methyl guanosine phosphorothioate
  modified_base 147: mod_base = OTHER; note = 2'O-methyl cytidine
aggccgtgcataaggctgtggttttagagctagaaatagcaagttaaaataaggctagtccgttatcaacttgaaaaagtggcaccgagtcggtgcagcagcttcagtccctttctcgtcgatggtcagcacagccttatgcacggc

SEQ ID NO: 24542 - RNA, 146 nt, synthetic construct
  source 1..146: mol_type = other RNA
  modified_base 1: mod_base = OTHER; note = 2'O-methyl adenosine phosphorothioate
  modified_base 2: mod_base = OTHER; note = 2'O-methyl guanosine phosphorothioate
  modified_base 3: mod_base = OTHER; note = 2'O-methyl guanosine phosphorothioate
  modified_base 143: mod_base = OTHER; note = adenosine phosphorothioate
  modified_base 144: mod_base = OTHER; note = 2'O-methyl cytidine phosphorothioate
  modified_base 145: mod_base = OTHER; note = 2'O-methyl guanosine phosphorothioate
  modified_base 146: mod_base = OTHER; note = 2'O-methyl guanosine
aggccgtgcataaggctgtggttttagagctagaaatagcaagttaaaataaggctagtccgttatcaacttgaaaaagtggcaccgagtcggtgcagcagcttcagtccctttctcgtcgatggtcagcacagccttatgcacgg

SEQ ID NO: 24543 - RNA, 145 nt, synthetic construct
  source 1..145: mol_type = other RNA
  modified_base 1: mod_base = OTHER; note = 2'O-methyl adenosine phosphorothioate
  modified_base 2: mod_base = OTHER; note = 2'O-methyl guanosine phosphorothioate
  modified_base 3: mod_base = OTHER; note = 2'O-methyl guanosine phosphorothioate
  modified_base 142: mod_base = OTHER; note = cytidine phosphorothioate
  modified_base 143: mod_base = OTHER; note = 2'O-methyl adenosine phosphorothioate
  modified_base 144: mod_base = OTHER; note = 2'O-methyl cytidine phosphorothioate
  modified_base 145: mod_base = OTHER; note = 2'O-methyl guanosine
aggccgtgcataaggctgtggttttagagctagaaatagcaagttaaaataaggctagtccgttatcaacttgaaaaagtggcaccgagtcggtgcagcagcttcagtccctttctcgtcgatggtcagcacagccttatgcacg

SEQ ID NO: 24544 - RNA, 144 nt, synthetic construct
  source 1..144: mol_type = other RNA
  modified_base 1: mod_base = OTHER; note = 2'O-methyl adenosine phosphorothioate
  modified_base 2: mod_base = OTHER; note = 2'O-methyl guanosine phosphorothioate
  modified_base 3: mod_base = OTHER; note = 2'O-methyl guanosine phosphorothioate
  modified_base 141: mod_base = OTHER; note = guanosine phosphorothioate
  modified_base 142: mod_base = OTHER; note = 2'O-methyl cytidine phosphorothioate
  modified_base 143: mod_base = OTHER; note = 2'O-methyl adenosine phosphorothioate
  modified_base 144: mod_base = OTHER; note = 2'O-methyl cytidine
aggccgtgcataaggctgtggttttagagctagaaatagcaagttaaaataaggctagtccgttatcaacttgaaaaagtggcaccgagtcggtgcagcagcttcagtccctttctcgtcgatggtcagcacagccttatgcac

SEQ ID NO: 24545 - RNA, 143 nt, synthetic construct
  source 1..143: mol_type = other RNA
  modified_base 1: mod_base = OTHER; note = 2'O-methyl adenosine phosphorothioate
  modified_base 2: mod_base = OTHER; note = 2'O-methyl guanosine phosphorothioate
  modified_base 3: mod_base = OTHER; note = 2'O-methyl guanosine phosphorothioate
  modified_base 140: mod_base = OTHER; note = uridine phosphorothioate
  modified_base 141: mod_base = OTHER; note = 2'O-methyl guanosine phosphorothioate
  modified_base 142: mod_base = OTHER; note = 2'O-methyl cytidine phosphorothioate
  modified_base 143: mod_base = OTHER; note = 2'O-methyl adenosine
aggccgtgcataaggctgtggttttagagctagaaatagcaagttaaaataaggctagtccgttatcaacttgaaaaagtggcaccgagtcggtgcagcagcttcagtccctttctcgtcgatggtcagcacagccttatgca

SEQ ID NO: 24546 - RNA, 142 nt, synthetic construct
  source 1..142: mol_type = other RNA
  modified_base 1: mod_base = OTHER; note = 2'O-methyl adenosine phosphorothioate
  modified_base 2: mod_base = OTHER; note = 2'O-methyl guanosine phosphorothioate
  modified_base 3: mod_base = OTHER; note = 2'O-methyl guanosine phosphorothioate
  modified_base 139: mod_base = OTHER; note = adenosine phosphorothioate
  modified_base 140: mod_base = OTHER; note = 2'O-methyl uridine phosphorothioate
  modified_base 141: mod_base = OTHER; note = 2'O-methyl guanosine phosphorothioate
  modified_base 142: mod_base = OTHER; note = 2'O-methyl cytidine
aggccgtgcataaggctgtggttttagagctagaaatagcaagttaaaataaggctagtccgttatcaacttgaaaaagtggcaccgagtcggtgcagcagcttcagtccctttctcgtcgatggtcagcacagccttatgc

SEQ ID NO: 24547 - RNA, 141 nt, synthetic construct
  source 1..141: mol_type = other RNA
  modified_base 1: mod_base = OTHER; note = 2'O-methyl adenosine phosphorothioate
  modified_base 2: mod_base = OTHER; note = 2'O-methyl guanosine phosphorothioate
  modified_base 3: mod_base = OTHER; note = 2'O-methyl guanosine phosphorothioate
  modified_base 138: mod_base = OTHER; note = uridine phosphorothioate
  modified_base 139: mod_base = OTHER; note = 2'O-methyl adenosine phosphorothioate
  modified_base 140: mod_base = OTHER; note = 2'O-methyl uridine phosphorothioate
  modified_base 141: mod_base = OTHER; note = 2'O-methyl guanosine
aggccgtgcataaggctgtggttttagagctagaaatagcaagttaaaataaggctagtccgttatcaacttgaaaaagtggcaccgagtcggtgcagcagcttcagtccctttctcgtcgatggtcagcacagccttatg

SEQ ID NO: 24548 - RNA, 140 nt, synthetic construct
  source 1..140: mol_type = other RNA
  modified_base 1: mod_base = OTHER; note = 2'O-methyl adenosine phosphorothioate
  modified_base 2: mod_base = OTHER; note = 2'O-methyl guanosine phosphorothioate
  modified_base 3: mod_base = OTHER; note = 2'O-methyl guanosine phosphorothioate
  modified_base 137: mod_base = OTHER; note = uridine phosphorothioate
  modified_base 138: mod_base = OTHER; note = 2'O-methyl uridine phosphorothioate
  modified_base 139: mod_base = OTHER; note = 2'O-methyl adenosine phosphorothioate
  modified_base 140: mod_base = OTHER; note = 2'O-methyl uridine
aggccgtgcataaggctgtggttttagagctagaaatagcaagttaaaataaggctagtccgttatcaacttgaaaaagtggcaccgagtcggtgcagcagcttcagtccctttctcgtcgatggtcagcacagccttat

SEQ ID NO: 24549 - RNA, 143 nt, synthetic construct
  source 1..143: mol_type = other RNA
  modified_base 1: mod_base = OTHER; note = 2'O-methyl adenosine phosphorothioate
  modified_base 2: mod_base = OTHER; note = 2'O-methyl guanosine phosphorothioate
  modified_base 3: mod_base = OTHER; note = 2'O-methyl guanosine phosphorothioate
  modified_base 140: mod_base = OTHER; note = guanosine phosphorothioate
  modified_base 141: mod_base = OTHER; note = 2'O-methyl cytidine phosphorothioate
  modified_base 142: mod_base = OTHER; note = 2'O-methyl cytidine phosphorothioate
  modified_base 143: mod_base = OTHER; note = 2'O-methyl uridine
aggccgtgcataaggctgtggttttagagctagaaatagcaagttaaaataaggctagtccgttatcaacttgaaaaagtggcaccgagtcggtgcttcagtccctttctcgtcgatggtcagcacagccttatgcacggcct

SEQ ID NO: 24550 - RNA, 142 nt, synthetic construct
  source 1..142: mol_type = other RNA
  modified_base 1: mod_base = OTHER; note = 2'O-methyl adenosine phosphorothioate
  modified_base 2: mod_base = OTHER; note = 2'O-methyl guanosine phosphorothioate
  modified_base 3: mod_base = OTHER; note = 2'O-methyl guanosine phosphorothioate
  modified_base 139: mod_base = OTHER; note = guanosine phosphorothioate
  modified_base 140: mod_base = OTHER; note = 2'O-methyl guanosine phosphorothioate
  modified_base 141: mod_base = OTHER; note = 2'O-methyl cytidine phosphorothioate
  modified_base 142: mod_base = OTHER; note = 2'O-methyl cytidine
aggccgtgcataaggctgtggttttagagctagaaatagcaagttaaaataaggctagtccgttatcaacttgaaaaagtggcaccgagtcggtgcttcagtccctttctcgtcgatggtcagcacagccttatgcacggcc

SEQ ID NO: 24551 - RNA, 141 nt, synthetic construct
  source 1..141: mol_type = other RNA
  modified_base 1: mod_base = OTHER; note = 2'O-methyl adenosine phosphorothioate
  modified_base 2: mod_base = OTHER; note = 2'O-methyl guanosine phosphorothioate
  modified_base 3: mod_base = OTHER; note = 2'O-methyl guanosine phosphorothioate
  modified_base 138: mod_base = OTHER; note = cytidine phosphorothioate
  modified_base 139: mod_base = OTHER; note = 2'O-methyl guanosine phosphorothioate
  modified_base 140: mod_base = OTHER; note = 2'O-methyl guanosine phosphorothioate
  modified_base 141: mod_base = OTHER; note = 2'O-methyl cytidine
aggccgtgcataaggctgtggttttagagctagaaatagcaagttaaaataaggctagtccgttatcaacttgaaaaagtggcaccgagtcggtgcttcagtccctttctcgtcgatggtcagcacagccttatgcacggc

SEQ ID NO: 24552 - RNA, 140 nt, synthetic construct
  source 1..140: mol_type = other RNA
  modified_base 1: mod_base = OTHER; note = 2'O-methyl adenosine phosphorothioate
  modified_base 2: mod_base = OTHER; note = 2'O-methyl guanosine phosphorothioate
  modified_base 3: mod_base = OTHER; note = 2'O-methyl guanosine phosphorothioate
  modified_base 137: mod_base = OTHER; note = adenosine phosphorothioate
  modified_base 138: mod_base = OTHER; note = 2'O-methyl cytidine phosphorothioate
  modified_base 139: mod_base = OTHER; note = 2'O-methyl guanosine phosphorothioate
  modified_base 140: mod_base = OTHER; note = 2'O-methyl guanosine
aggccgtgcataaggctgtggttttagagctagaaatagcaagttaaaataaggctagtccgttatcaacttgaaaaagtggcaccgagtcggtgcttcagtccctttctcgtcgatggtcagcacagccttatgcacgg

SEQ ID NO: 24553 - RNA, 139 nt, synthetic construct
  source 1..139: mol_type = other RNA
  modified_base 1: mod_base = OTHER; note = 2'O-methyl adenosine phosphorothioate
  modified_base 2: mod_base = OTHER; note = 2'O-methyl guanosine phosphorothioate
  modified_base 3: mod_base = OTHER; note = 2'O-methyl guanosine phosphorothioate
  modified_base 136: mod_base = OTHER; note = cytidine phosphorothioate
  modified_base 137: mod_base = OTHER; note = 2'O-methyl adenosine phosphorothioate
  modified_base 138: mod_base = OTHER; note = 2'O-methyl cytidine phosphorothioate
  modified_base 139: mod_base = OTHER; note = 2'O-methyl guanosine
aggccgtgcataaggctgtggttttagagctagaaatagcaagttaaaataaggctagtccgttatcaacttgaaaaagtggcaccgagtcggtgcttcagtccctttctcgtcgatggtcagcacagccttatgcacg

SEQ ID NO: 24554 - RNA, 138 nt, synthetic construct
  source 1..138: mol_type = other RNA
  modified_base 1: mod_base = OTHER; note = 2'O-methyl adenosine phosphorothioate
  modified_base 2: mod_base = OTHER; note = 2'O-methyl guanosine phosphorothioate
  modified_base 3: mod_base = OTHER; note = 2'O-methyl guanosine phosphorothioate
  modified_base 135: mod_base = OTHER; note = guanosine phosphorothioate
  modified_base 136: mod_base = OTHER; note = 2'O-methyl cytidine phosphorothioate
  modified_base 137: mod_base = OTHER; note = 2'O-methyl adenosine phosphorothioate
  modified_base 138: mod_base = OTHER; note = 2'O-methyl cytidine
aggccgtgcataaggctgtggttttagagctagaaatagcaagttaaaataaggctagtccgttatcaacttgaaaaagtggcaccgagtcggtgcttcagtccctttctcgtcgatggtcagcacagccttatgcac

SEQ ID NO: 24555 - RNA, 137 nt, synthetic construct
  source 1..137: mol_type = other RNA
  modified_base 1: mod_base = OTHER; note = 2'O-methyl adenosine phosphorothioate
  modified_base 2: mod_base = OTHER; note = 2'O-methyl guanosine phosphorothioate
  modified_base 3: mod_base = OTHER; note = 2'O-methyl guanosine phosphorothioate
  modified_base 134: mod_base = OTHER; note = uridine phosphorothioate
  modified_base 135: mod_base = OTHER; note = 2'O-methyl guanosine phosphorothioate
  modified_base 136: mod_base = OTHER; note = 2'O-methyl cytidine phosphorothioate
  modified_base 137: mod_base = OTHER; note = 2'O-methyl adenosine
aggccgtgcataaggctgtggttttagagctagaaatagcaagttaaaataaggctagtccgttatcaacttgaaaaagtggcaccgagtcggtgcttcagtccctttctcgtcgatggtcagcacagccttatgca

SEQ ID NO: 24556 - RNA, 136 nt, synthetic construct
  source 1..136: mol_type = other RNA
  modified_base 1: mod_base = OTHER; note = 2'O-methyl adenosine phosphorothioate
  modified_base 2: mod_base = OTHER; note = 2'O-methyl guanosine phosphorothioate
  modified_base 3: mod_base = OTHER; note = 2'O-methyl guanosine phosphorothioate
  modified_base 133: mod_base = OTHER; note = adenosine phosphorothioate
  modified_base 134: mod_base = OTHER; note = 2'O-methyl uridine phosphorothioate
  modified_base 135: mod_base = OTHER; note = 2'O-methyl guanosine phosphorothioate
  modified_base 136: mod_base = OTHER; note = 2'O-methyl cytidine
aggccgtgcataaggctgtggttttagagctagaaatagcaagttaaaataaggctagtccgttatcaacttgaaaaagtggcaccgagtcggtgcttcagtccctttctcgtcgatggtcagcacagccttatgc

SEQ ID NO: 24557 - RNA, 135 nt, synthetic construct
  source 1..135: mol_type = other RNA
  modified_base 1: mod_base = OTHER; note = 2'O-methyl adenosine phosphorothioate
  modified_base 2: mod_base = OTHER; note = 2'O-methyl guanosine phosphorothioate
  modified_base 3: mod_base = OTHER; note = 2'O-methyl guanosine phosphorothioate
  modified_base 132: mod_base = OTHER; note = uridine phosphorothioate
  modified_base 133: mod_base = OTHER; note = 2'O-methyl adenosine phosphorothioate
  modified_base 134: mod_base = OTHER; note = 2'O-methyl uridine phosphorothioate
  modified_base 135: mod_base = OTHER; note = 2'O-methyl guanosine
aggccgtgcataaggctgtggttttagagctagaaatagcaagttaaaataaggctagtccgttatcaacttgaaaaagtggcaccgagtcggtgcttcagtccctttctcgtcgatggtcagcacagccttatg

SEQ ID NO: 24558 - RNA, 134 nt, synthetic construct
  source 1..134: mol_type = other RNA
  modified_base 1: mod_base = OTHER; note = 2'O-methyl adenosine phosphorothioate
  modified_base 2: mod_base = OTHER; note = 2'O-methyl guanosine phosphorothioate
  modified_base 3: mod_base = OTHER; note = 2'O-methyl guanosine phosphorothioate
  modified_base 131: mod_base = OTHER; note = uridine phosphorothioate
  modified_base 132: mod_base = OTHER; note = 2'O-methyl uridine phosphorothioate
  modified_base 133: mod_base = OTHER; note = 2'O-methyl adenosine phosphorothioate
  modified_base 134: mod_base = OTHER; note = 2'O-methyl uridine
aggccgtgcataaggctgtggttttagagctagaaatagcaagttaaaataaggctagtccgttatcaacttgaaaaagtggcaccgagtcggtgcttcagtccctttctcgtcgatggtcagcacagccttat

SEQ ID NO: 24559 - RNA, 140 nt, synthetic construct
  source 1..140: mol_type = other RNA
  modified_base 1: mod_base = OTHER; note = 2'O-methyl adenosine phosphorothioate
  modified_base 2: mod_base = OTHER; note = 2'O-methyl guanosine phosphorothioate
  modified_base 3: mod_base = OTHER; note = 2'O-methyl guanosine phosphorothioate
  modified_base 137: mod_base = OTHER; note = guanosine phosphorothioate
  modified_base 138: mod_base = OTHER; note = 2'O-methyl cytidine phosphorothioate
  modified_base 139: mod_base = OTHER; note = 2'O-methyl cytidine phosphorothioate
  modified_base 140: mod_base = OTHER; note = 2'O-methyl uridine
aggccgtgcataaggctgtggttttagagctagaaatagcaagttaaaataaggctagtccgttatcaacttgaaaaagtggcaccgagtcggtgcagtccctttctcgtcgatggtcagcacagccttatgcacggcct

SEQ ID NO: 24560 - RNA, 139 nt, synthetic construct
  source 1..139: mol_type = other RNA
  modified_base 1: mod_base = OTHER; note = 2'O-methyl adenosine phosphorothioate
  modified_base 2: mod_base = OTHER; note = 2'O-methyl guanosine phosphorothioate
  modified_base 3: mod_base = OTHER; note = 2'O-methyl guanosine phosphorothioate
  modified_base 136: mod_base = OTHER; note = guanosine phosphorothioate
  modified_base 137: mod_base = OTHER; note = 2'O-methyl guanosine phosphorothioate
  modified_base 138: mod_base = OTHER; note = 2'O-methyl cytidine phosphorothioate
  modified_base 139: mod_base = OTHER; note = 2'O-methyl cytidine
aggccgtgcataaggctgtggttttagagctagaaatagcaagttaaaataaggctagtccgttatcaacttgaaaaagtggcaccgagtcggtgcagtccctttctcgtcgatggtcagcacagccttatgcacggcc

SEQ ID NO: 24561 - RNA, 138 nt, synthetic construct
  source 1..138: mol_type = other RNA
  modified_base 1: mod_base = OTHER; note = 2'O-methyl adenosine phosphorothioate
  modified_base 2: mod_base = OTHER; note = 2'O-methyl guanosine phosphorothioate
  modified_base 3: mod_base = OTHER; note = 2'O-methyl guanosine phosphorothioate
  modified_base 135: mod_base = OTHER; note = cytidine phosphorothioate
  modified_base 136: mod_base = OTHER; note = 2'O-methyl guanosine phosphorothioate
  modified_base 137: mod_base = OTHER; note = 2'O-methyl guanosine phosphorothioate
  modified_base 138: mod_base = OTHER; note = 2'O-methyl cytidine
aggccgtgcataaggctgtggttttagagctagaaatagcaagttaaaataaggctagtccgttatcaacttgaaaaagtggcaccgagtcggtgcagtccctttctcgtcgatggtcagcacagccttatgcacggc

SEQ ID NO: 24562 - RNA, 137 nt, synthetic construct
  source 1..137: mol_type = other RNA
  modified_base 1: mod_base = OTHER; note = 2'O-methyl adenosine phosphorothioate
  modified_base 2: mod_base = OTHER; note = 2'O-methyl guanosine phosphorothioate
  modified_base 3: mod_base = OTHER; note = 2'O-methyl guanosine phosphorothioate
  modified_base 134: mod_base = OTHER; note = adenosine phosphorothioate
  modified_base 135: mod_base = OTHER; note = 2'O-methyl cytidine phosphorothioate
  modified_base 136: mod_base = OTHER; note = 2'O-methyl guanosine phosphorothioate
  modified_base 137: mod_base = OTHER; note = 2'O-methyl guanosine
aggccgtgcataaggctgtggttttagagctagaaatagcaagttaaaataaggctagtccgttatcaacttgaaaaagtggcaccgagtcggtgcagtccctttctcgtcgatggtcagcacagccttatgcacgg

SEQ ID NO: 24563 - RNA, 136 nt, synthetic construct
  source 1..136: mol_type = other RNA
  modified_base 1: mod_base = OTHER; note = 2'O-methyl adenosine phosphorothioate
  modified_base 2: mod_base = OTHER; note = 2'O-methyl guanosine phosphorothioate
  modified_base 3: mod_base = OTHER; note = 2'O-methyl guanosine phosphorothioate
  modified_base 133: mod_base = OTHER; note = cytidine phosphorothioate
  modified_base 134: mod_base = OTHER; note = 2'O-methyl adenosine phosphorothioate
  modified_base 135: mod_base = OTHER; note = 2'O-methyl cytidine phosphorothioate
  modified_base 136: mod_base = OTHER; note = 2'O-methyl guanosine
aggccgtgcataaggctgtggttttagagctagaaatagcaagttaaaataaggctagtccgttatcaacttgaaaaagtggcaccgagtcggtgcagtccctttctcgtcgatggtcagcacagccttatgcacg

SEQ ID NO: 24564 - RNA, 135 nt, synthetic construct
  source 1..135: mol_type = other RNA
  modified_base 1: mod_base = OTHER; note = 2'O-methyl adenosine phosphorothioate
  modified_base 2: mod_base = OTHER; note = 2'O-methyl guanosine phosphorothioate
  modified_base 3: mod_base = OTHER; note = 2'O-methyl guanosine phosphorothioate
  modified_base 132: mod_base = OTHER; note = guanosine phosphorothioate
  modified_base 133: mod_base = OTHER; note = 2'O-methyl cytidine phosphorothioate
  modified_base 134: mod_base = OTHER; note = 2'O-methyl adenosine phosphorothioate
  modified_base 135: mod_base = OTHER; note = 2'O-methyl cytidine
aggccgtgcataaggctgtggttttagagctagaaatagcaagttaaaataaggctagtccgttatcaacttgaaaaagtggcaccgagtcggtgcagtccctttctcgtcgatggtcagcacagccttatgcac

SEQ ID NO: 24565 - RNA, 134 nt, synthetic construct
  source 1..134: mol_type = other RNA
  modified_base 1: mod_base = OTHER; note = 2'O-methyl adenosine phosphorothioate
  modified_base 2: mod_base = OTHER; note = 2'O-methyl guanosine phosphorothioate
  modified_base 3: mod_base = OTHER; note = 2'O-methyl guanosine phosphorothioate
  modified_base 131: mod_base = OTHER; note = uridine phosphorothioate
  modified_base 132: mod_base = OTHER; note = 2'O-methyl guanosine phosphorothioate
  modified_base 133: mod_base = OTHER; note = 2'O-methyl cytidine phosphorothioate
  modified_base 134: mod_base = OTHER; note = 2'O-methyl adenosine
aggccgtgcataaggctgtggttttagagctagaaatagcaagttaaaataaggctagtccgttatcaacttgaaaaagtggcaccgagtcggtgcagtccctttctcgtcgatggtcagcacagccttatgca

SEQ ID NO: 24566 - RNA, 133 nt, synthetic construct
  source 1..133: mol_type = other RNA
  modified_base 1: mod_base = OTHER; note = 2'O-methyl adenosine phosphorothioate
  modified_base 2: mod_base = OTHER; note = 2'O-methyl guanosine phosphorothioate
  modified_base 3: mod_base = OTHER; note = 2'O-methyl guanosine phosphorothioate
  modified_base 130: mod_base = OTHER; note = adenosine phosphorothioate
  modified_base 131: mod_base = OTHER; note = 2'O-methyl uridine phosphorothioate
  modified_base 132: mod_base = OTHER; note = 2'O-methyl guanosine phosphorothioate
  modified_base 133: mod_base = OTHER; note = 2'O-methyl cytidine
aggccgtgcataaggctgtggttttagagctagaaatagcaagttaaaataaggctagtccgttatcaacttgaaaaagtggcaccgagtcggtgcagtccctttctcgtcgatggtcagcacagccttatgc

SEQ ID NO: 24567 - RNA, 132 nt, synthetic construct
  source 1..132: mol_type = other RNA
  modified_base 1: mod_base = OTHER; note = 2'O-methyl adenosine phosphorothioate
  modified_base 2: mod_base = OTHER; note = 2'O-methyl guanosine phosphorothioate
  modified_base 3: mod_base = OTHER; note = 2'O-methyl guanosine phosphorothioate
  modified_base 129: mod_base = OTHER; note = uridine phosphorothioate
  modified_base 130: mod_base = OTHER; note = 2'O-methyl adenosine phosphorothioate
  modified_base 131: mod_base = OTHER; note = 2'O-methyl uridine phosphorothioate
  modified_base 132: mod_base = OTHER; note = 2'O-methyl guanosine
aggccgtgcataaggctgtggttttagagctagaaatagcaagttaaaataaggctagtccgttatcaacttgaaaaagtggcaccgagtcggtgcagtccctttctcgtcgatggtcagcacagccttatg

SEQ ID NO: 24568 - RNA, 131 nt, synthetic construct
  source 1..131: mol_type = other RNA
  modified_base 1: mod_base = OTHER; note = 2'O-methyl adenosine phosphorothioate
  modified_base 2: mod_base = OTHER; note = 2'O-methyl guanosine phosphorothioate
  modified_base 3: mod_base = OTHER; note = 2'O-methyl guanosine phosphorothioate
  modified_base 128: mod_base = OTHER; note = uridine phosphorothioate
  modified_base 129: mod_base = OTHER; note = 2'O-methyl uridine phosphorothioate
  modified_base 130: mod_base = OTHER; note = 2'O-methyl adenosine phosphorothioate
  modified_base 131: mod_base = OTHER; note = 2'O-methyl uridine
aggccgtgcataaggctgtggttttagagctagaaatagcaagttaaaataaggctagtccgttatcaacttgaaaaagtggcaccgagtcggtgcagtccctttctcgtcgatggtcagcacagccttat

SEQ ID NO: 24569 - RNA, 138 nt, synthetic construct
  source 1..138: mol_type = other RNA
  modified_base 1: mod_base = OTHER; note = 2'O-methyl adenosine phosphorothioate
  modified_base 2: mod_base = OTHER; note = 2'O-methyl guanosine phosphorothioate
  modified_base 3: mod_base = OTHER; note = 2'O-methyl guanosine phosphorothioate
  modified_base 135: mod_base = OTHER; note = guanosine phosphorothioate
  modified_base 136: mod_base = OTHER; note = 2'O-methyl cytidine phosphorothioate
  modified_base 137: mod_base = OTHER; note = 2'O-methyl cytidine phosphorothioate
  modified_base 138: mod_base = OTHER; note = 2'O-methyl uridine
aggccgtgcataaggctgtggttttagagctagaaatagcaagttaaaataaggctagtccgttatcaacttgaaaaagtggcaccgagtcggtgctccctttctcgtcgatggtcagcacagccttatgcacggcct

SEQ ID NO: 24570 - RNA, 137 nt, synthetic construct
  source 1..137: mol_type = other RNA
  modified_base 1: mod_base = OTHER; note = 2'O-methyl adenosine phosphorothioate
  modified_base 2: mod_base = OTHER; note = 2'O-methyl guanosine phosphorothioate
  modified_base 3: mod_base = OTHER; note = 2'O-methyl guanosine phosphorothioate
  modified_base 134: mod_base = OTHER; note = guanosine phosphorothioate
  modified_base 135: mod_base = OTHER; note = 2'O-methyl guanosine phosphorothioate
  modified_base 136: mod_base = OTHER; note = 2'O-methyl cytidine phosphorothioate
  modified_base 137: mod_base = OTHER; note = 2'O-methyl cytidine
aggccgtgcataaggctgtggttttagagctagaaatagcaagttaaaataaggctagtccgttatcaacttgaaaaagtggcaccgagtcggtgctccctttctcgtcgatggtcagcacagccttatgcacggcc

SEQ ID NO: 24571 - RNA, 136 nt, synthetic construct
  source 1..136: mol_type = other RNA
  modified_base 1: mod_base = OTHER; note = 2'O-methyl adenosine phosphorothioate
  modified_base 2: mod_base = OTHER; note = 2'O-methyl guanosine phosphorothioate
  modified_base 3: mod_base = OTHER; note = 2'O-methyl guanosine phosphorothioate
  modified_base 133: mod_base = OTHER; note = cytidine phosphorothioate
  modified_base 134: mod_base = OTHER; note = 2'O-methyl guanosine phosphorothioate
  modified_base 135: mod_base = OTHER; note = 2'O-methyl guanosine phosphorothioate
  modified_base 136: mod_base = OTHER; note = 2'O-methyl cytidine
aggccgtgcataaggctgtggttttagagctagaaatagcaagttaaaataaggctagtccgttatcaacttgaaaaagtggcaccgagtcggtgctccctttctcgtcgatggtcagcacagccttatgcacggc

SEQ ID NO: 24572 - RNA, 135 nt, synthetic construct
  source 1..135: mol_type = other RNA
  modified_base 1: mod_base = OTHER; note = 2'O-methyl adenosine phosphorothioate
  modified_base 2: mod_base = OTHER; note = 2'O-methyl guanosine phosphorothioate
  modified_base 3: mod_base = OTHER; note = 2'O-methyl guanosine phosphorothioate
  modified_base 132: mod_base = OTHER; note = adenosine phosphorothioate
  modified_base 133: mod_base = OTHER; note = 2'O-methyl cytidine phosphorothioate
  modified_base 134: mod_base = OTHER; note = 2'O-methyl guanosine phosphorothioate
  modified_base 135: mod_base = OTHER; note = 2'O-methyl guanosine
aggccgtgcataaggctgtggttttagagctagaaatagcaagttaaaataaggctagtccgttatcaacttgaaaaagtggcaccgagtcggtgctccctttctcgtcgatggtcagcacagccttatgcacgg

SEQ ID NO: 24573 - RNA, 134 nt, synthetic construct
  source 1..134: mol_type = other RNA
  modified_base 1: mod_base = OTHER; note = 2'O-methyl adenosine phosphorothioate
  modified_base 2: mod_base = OTHER; note = 2'O-methyl guanosine phosphorothioate
  modified_base 3: mod_base = OTHER; note = 2'O-methyl guanosine phosphorothioate
  modified_base 131: mod_base = OTHER; note = cytidine phosphorothioate
  modified_base 132: mod_base = OTHER; note = 2'O-methyl adenosine phosphorothioate
  modified_base 133: mod_base = OTHER; note = 2'O-methyl cytidine phosphorothioate
  modified_base 134: mod_base = OTHER; note = 2'O-methyl guanosine
aggccgtgcataaggctgtggttttagagctagaaatagcaagttaaaataaggctagtccgttatcaacttgaaaaagtggcaccgagtcggtgctccctttctcgtcgatggtcagcacagccttatgcacg

SEQ ID NO: 24574 - RNA, 133 nt, synthetic construct
  source 1..133: mol_type = other RNA
  modified_base 1: mod_base = OTHER; note = 2'O-methyl adenosine phosphorothioate
  modified_base 2: mod_base = OTHER; note = 2'O-methyl guanosine phosphorothioate
  modified_base 3: mod_base = OTHER; note = 2'O-methyl guanosine phosphorothioate
  modified_base 130: mod_base = OTHER; note = guanosine phosphorothioate
  modified_base 131: mod_base = OTHER; note = 2'O-methyl cytidine phosphorothioate
  modified_base 132: mod_base = OTHER; note = 2'O-methyl adenosine phosphorothioate
  modified_base 133: mod_base = OTHER; note = 2'O-methyl cytidine
aggccgtgcataaggctgtggttttagagctagaaatagcaagttaaaataaggctagtccgttatcaacttgaaaaagtggcaccgagtcggtgctccctttctcgtcgatggtcagcacagccttatgcac

SEQ ID NO: 24575 - RNA, 132 nt, synthetic construct
  source 1..132: mol_type = other RNA
  modified_base 1: mod_base = OTHER; note = 2'O-methyl adenosine phosphorothioate
  modified_base 2: mod_base = OTHER; note = 2'O-methyl guanosine phosphorothioate
  modified_base 3: mod_base = OTHER; note = 2'O-methyl guanosine phosphorothioate
  modified_base 129: mod_base = OTHER; note = uridine phosphorothioate
  modified_base 130: mod_base = OTHER; note = 2'O-methyl guanosine phosphorothioate
  modified_base 131: mod_base = OTHER; note = 2'O-methyl cytidine phosphorothioate
  modified_base 132: mod_base = OTHER; note = 2'O-methyl adenosine
aggccgtgcataaggctgtggttttagagctagaaatagcaagttaaaataaggctagtccgttatcaacttgaaaaagtggcaccgagtcggtgctccctttctcgtcgatggtcagcacagccttatgca

SEQ ID NO: 24576 - RNA, 131 nt, synthetic construct
  source 1..131: mol_type = other RNA
  modified_base 1: mod_base = OTHER; note = 2'O-methyl adenosine phosphorothioate
  modified_base 2: mod_base = OTHER; note = 2'O-methyl guanosine phosphorothioate
  modified_base 3: mod_base = OTHER; note = 2'O-methyl guanosine phosphorothioate
  modified_base 128: mod_base = OTHER; note = adenosine phosphorothioate
  modified_base 129: mod_base = OTHER; note = 2'O-methyl uridine phosphorothioate
  modified_base 130: mod_base = OTHER; note = 2'O-methyl guanosine phosphorothioate
  modified_base 131: mod_base = OTHER; note = 2'O-methyl cytidine
aggccgtgcataaggctgtggttttagagctagaaatagcaagttaaaataaggctagtccgttatcaacttgaaaaagtggcaccgagtcggtgctccctttctcgtcgatggtcagcacagccttatgc

SEQ ID NO: 24577 - RNA, 130 nt, synthetic construct
  source 1..130: mol_type = other RNA
  modified_base 1: mod_base = OTHER; note = 2'O-methyl adenosine phosphorothioate
  modified_base 2: mod_base = OTHER; note = 2'O-methyl guanosine phosphorothioate
  modified_base 3: mod_base = OTHER; note = 2'O-methyl guanosine phosphorothioate
  modified_base 127: mod_base = OTHER; note = uridine phosphorothioate
  modified_base 128: mod_base = OTHER; note = 2'O-methyl adenosine phosphorothioate
  modified_base 129: mod_base = OTHER; note = 2'O-methyl uridine phosphorothioate
  modified_base 130: mod_base = OTHER; note = 2'O-methyl guanosine
aggccgtgcataaggctgtggttttagagctagaaatagcaagttaaaataaggctagtccgttatcaacttgaaaaagtggcaccgagtcggtgctccctttctcgtcgatggtcagcacagccttatg

SEQ ID NO: 24578 - RNA, 129 nt, synthetic construct
  source 1..129: mol_type = other RNA
  modified_base 1: mod_base = OTHER; note = 2'O-methyl adenosine phosphorothioate
  modified_base 2: mod_base = OTHER; note = 2'O-methyl guanosine phosphorothioate
  modified_base 3: mod_base = OTHER; note = 2'O-methyl guanosine phosphorothioate
  modified_base 126: mod_base = OTHER; note = uridine phosphorothioate
  modified_base 127: mod_base = OTHER; note = 2'O-methyl uridine phosphorothioate
  modified_base 128: mod_base = OTHER; note = 2'O-methyl adenosine phosphorothioate
  modified_base 129: mod_base = OTHER; note = 2'O-methyl uridine
aggccgtgcataaggctgtggttttagagctagaaatagcaagttaaaataaggctagtccgttatcaacttgaaaaagtggcaccgagtcggtgctccctttctcgtcgatggtcagcacagccttat

SEQ ID NO: 24579 - RNA, 136 nt, synthetic construct
  source 1..136: mol_type = other RNA
  modified_base 1: mod_base = OTHER; note = 2'O-methyl adenosine phosphorothioate
  modified_base 2: mod_base = OTHER; note = 2'O-methyl guanosine phosphorothioate
  modified_base 3: mod_base = OTHER; note = 2'O-methyl guanosine phosphorothioate
  modified_base 133: mod_base = OTHER; note = guanosine phosphorothioate
  modified_base 134: mod_base = OTHER; note = 2'O-methyl cytidine phosphorothioate
  modified_base 135: mod_base = OTHER; note = 2'O-methyl cytidine phosphorothioate
  modified_base 136: mod_base = OTHER; note = 2'O-methyl uridine
aggccgtgcataaggctgtggttttagagctagaaatagcaagttaaaataaggctagtccgttatcaacttgaaaaagtggcaccgagtcggtgccctttctcgtcgatggtcagcacagccttatgcacggcct

SEQ ID NO: 24580 - RNA, 135 nt, synthetic construct
  source 1..135: mol_type = other RNA
  modified_base 1: mod_base = OTHER; note = 2'O-methyl adenosine phosphorothioate
  modified_base 2: mod_base = OTHER; note = 2'O-methyl guanosine phosphorothioate
  modified_base 3: mod_base = OTHER; note = 2'O-methyl guanosine phosphorothioate
  modified_base 132: mod_base = OTHER; note = guanosine phosphorothioate
  modified_base 133: mod_base = OTHER; note = 2'O-methyl guanosine phosphorothioate
  modified_base 134: mod_base = OTHER; note = 2'O-methyl cytidine phosphorothioate
  modified_base 135: mod_base = OTHER; note = 2'O-methyl cytidine
aggccgtgcataaggctgtggttttagagctagaaatagcaagttaaaataaggctagtccgttatcaacttgaaaaagtggcaccgagtcggtgccctttctcgtcgatggtcagcacagccttatgcacggcc

SEQ ID NO: 24581 - RNA, 134 nt, synthetic construct
  source 1..134: mol_type = other RNA
  modified_base 1: mod_base = OTHER; note = 2'O-methyl adenosine phosphorothioate
  modified_base 2: mod_base = OTHER; note = 2'O-methyl guanosine phosphorothioate
  modified_base 3: mod_base = OTHER; note = 2'O-methyl guanosine phosphorothioate
  modified_base 131: mod_base = OTHER; note = cytidine phosphorothioate
  modified_base 132: mod_base = OTHER; note = 2'O-methyl guanosine phosphorothioate
  modified_base 133: mod_base = OTHER; note = 2'O-methyl guanosine phosphorothioate
  modified_base 134: mod_base = OTHER; note = 2'O-methyl cytidine
aggccgtgcataaggctgtggttttagagctagaaatagcaagttaaaataaggctagtccgttatcaacttgaaaaagtggcaccgagtcggtgccctttctcgtcgatggtcagcacagccttatgcacggc

SEQ ID NO: 24582 - RNA, 133 nt, synthetic construct
  source 1..133: mol_type = other RNA
  modified_base 1: mod_base = OTHER; note = 2'O-methyl adenosine phosphorothioate
  modified_base 2: mod_base = OTHER; note = 2'O-methyl guanosine phosphorothioate
  modified_base 3: mod_base = OTHER; note = 2'O-methyl guanosine phosphorothioate
  modified_base 130: mod_base = OTHER; note = adenosine phosphorothioate
  modified_base 131: mod_base = OTHER; note = 2'O-methyl cytidine phosphorothioate
  modified_base 132: mod_base = OTHER; note = 2'O-methyl guanosine phosphorothioate
  modified_base 133: mod_base = OTHER; note = 2'O-methyl guanosine
aggccgtgcataaggctgtggttttagagctagaaatagcaagttaaaataaggctagtccgttatcaacttgaaaaagtggcaccgagtcggtgccctttctcgtcgatggtcagcacagccttatgcacgg

SEQ ID NO: 24583 - RNA, 132 nt, synthetic construct
  source 1..132: mol_type = other RNA
  modified_base 1: mod_base = OTHER; note = 2'O-methyl adenosine phosphorothioate
  modified_base 2: mod_base = OTHER; note = 2'O-methyl guanosine phosphorothioate
  modified_base 3: mod_base = OTHER; note = 2'O-methyl guanosine phosphorothioate
  modified_base 129: mod_base = OTHER; note = cytidine phosphorothioate
  modified_base 130: mod_base = OTHER; note = 2'O-methyl adenosine phosphorothioate
  modified_base 131: mod_base = OTHER; note = 2'O-methyl cytidine phosphorothioate
  modified_base 132: mod_base = OTHER; note = 2'O-methyl guanosine
aggccgtgcataaggctgtggttttagagctagaaatagcaagttaaaataaggctagtccgttatcaacttgaaaaagtggcaccgagtcggtgccctttctcgtcgatggtcagcacagccttatgcacg

SEQ ID NO: 24584 - RNA, 131 nt, synthetic construct
  source 1..131: mol_type = other RNA
  modified_base 1: mod_base = OTHER; note = 2'O-methyl adenosine phosphorothioate
  modified_base 2: mod_base = OTHER; note = 2'O-methyl guanosine phosphorothioate
  modified_base 3: mod_base = OTHER; note = 2'O-methyl guanosine phosphorothioate
  modified_base 128: mod_base = OTHER; note = guanosine phosphorothioate
  modified_base 129: mod_base = OTHER; note = 2'O-methyl cytidine phosphorothioate
  modified_base 130: mod_base = OTHER; note = 2'O-methyl adenosine phosphorothioate
  modified_base 131: mod_base = OTHER; note = 2'O-methyl cytidine
aggccgtgcataaggctgtggttttagagctagaaatagcaagttaaaataaggctagtccgttatcaacttgaaaaagtggcaccgagtcggtgccctttctcgtcgatggtcagcacagccttatgcac

SEQ ID NO: 24585 - RNA, 130 nt, synthetic construct
  source 1..130: mol_type = other RNA
  modified_base 1: mod_base = OTHER; note = 2'O-methyl adenosine phosphorothioate
  modified_base 2: mod_base = OTHER; note = 2'O-methyl guanosine phosphorothioate
  modified_base 3: mod_base = OTHER; note = 2'O-methyl guanosine phosphorothioate
  modified_base 127: mod_base = OTHER; note = uridine phosphorothioate
  modified_base 128: mod_base = OTHER; note = 2'O-methyl guanosine phosphorothioate
  modified_base 129: mod_base = OTHER; note = 2'O-methyl cytidine phosphorothioate
  modified_base 130: mod_base = OTHER; note = 2'O-methyl adenosine
aggccgtgcataaggctgtggttttagagctagaaatagcaagttaaaataaggctagtccgttatcaacttgaaaaagtggcaccgagtcggtgccctttctcgtcgatggtcagcacagccttatgca

SEQ ID NO: 24586 - RNA, 129 nt, synthetic construct
  source 1..129: mol_type = other RNA
  modified_base 1: mod_base = OTHER; note = 2'O-methyl adenosine phosphorothioate
  modified_base 2: mod_base = OTHER; note = 2'O-methyl guanosine phosphorothioate
  modified_base 3: mod_base = OTHER; note = 2'O-methyl guanosine phosphorothioate
  modified_base 126: mod_base = OTHER; note = adenosine phosphorothioate
  modified_base 127: mod_base = OTHER; note = 2'O-methyl uridine phosphorothioate
  modified_base 128: mod_base = OTHER; note = 2'O-methyl guanosine phosphorothioate
  modified_base 129: mod_base = OTHER; note = 2'O-methyl cytidine
aggccgtgcataaggctgtggttttagagctagaaatagcaagttaaaataaggctagtccgttatcaacttgaaaaagtggcaccgagtcggtgccctttctcgtcgatggtcagcacagccttatgc

SEQ ID NO: 24587 - RNA, 128 nt, synthetic construct
  source 1..128: mol_type = other RNA
  modified_base 1: mod_base = OTHER; note = 2'O-methyl adenosine phosphorothioate
  modified_base 2: mod_base = OTHER; note = 2'O-methyl guanosine phosphorothioate
  modified_base 3: mod_base = OTHER; note = 2'O-methyl guanosine phosphorothioate
  modified_base 125: mod_base = OTHER; note = uridine phosphorothioate
  modified_base 126: mod_base = OTHER; note = 2'O-methyl adenosine phosphorothioate
  modified_base 127: mod_base = OTHER; note = 2'O-methyl uridine phosphorothioate
  modified_base 128: mod_base = OTHER; note = 2'O-methyl guanosine
aggccgtgcataaggctgtggttttagagctagaaatagcaagttaaaataaggctagtccgttatcaacttgaaaaagtggcaccgagtcggtgccctttctcgtcgatggtcagcacagccttatg

SEQ ID NO: 24588 - RNA, 127 nt, synthetic construct
  source 1..127: mol_type = other RNA
  modified_base 1: mod_base = OTHER; note = 2'O-methyl adenosine phosphorothioate
  modified_base 2: mod_base = OTHER; note = 2'O-methyl guanosine phosphorothioate
  modified_base 3: mod_base = OTHER; note = 2'O-methyl guanosine phosphorothioate
  modified_base 124: mod_base = OTHER; note = uridine phosphorothioate
  modified_base 125: mod_base = OTHER; note = 2'O-methyl uridine phosphorothioate
  modified_base 126: mod_base = OTHER; note = 2'O-methyl adenosine phosphorothioate
  modified_base 127: mod_base = OTHER; note = 2'O-methyl uridine
aggccgtgcataaggctgtggttttagagctagaaatagcaagttaaaataaggctagtccgttatcaacttgaaaaagtggcaccgagtcggtgccctttctcgtcgatggtcagcacagccttat

SEQ ID NO: 24589 - RNA, 134 nt, synthetic construct
  source 1..134: mol_type = other RNA
  modified_base 1: mod_base = OTHER; note = 2'O-methyl adenosine phosphorothioate
  modified_base 2: mod_base = OTHER; note = 2'O-methyl guanosine phosphorothioate
  modified_base 3: mod_base = OTHER; note = 2'O-methyl guanosine phosphorothioate
  modified_base 131: mod_base = OTHER; note = guanosine phosphorothioate
  modified_base 132: mod_base = OTHER; note = 2'O-methyl cytidine phosphorothioate
  modified_base 133: mod_base = OTHER; note = 2'O-methyl cytidine phosphorothioate
  modified_base 134: mod_base = OTHER; note = 2'O-methyl uridine
aggccgtgcataaggctgtggttttagagctagaaatagcaagttaaaataaggctagtccgttatcaacttgaaaaagtggcaccgagtcggtgctttctcgtcgatggtcagcacagccttatgcacggcct

SEQ ID NO: 24590 - RNA, 133 nt, synthetic construct
  source 1..133: mol_type = other RNA
  modified_base 1: mod_base = OTHER; note = 2'O-methyl adenosine phosphorothioate
  modified_base 2: mod_base = OTHER; note = 2'O-methyl guanosine phosphorothioate
  modified_base 3: mod_base = OTHER; note = 2'O-methyl guanosine phosphorothioate
  modified_base 130: mod_base = OTHER; note = guanosine phosphorothioate
  modified_base 131: mod_base = OTHER; note = 2'O-methyl guanosine phosphorothioate
  modified_base 132: mod_base = OTHER; note = 2'O-methyl cytidine phosphorothioate
  modified_base 133: mod_base = OTHER; note = 2'O-methyl cytidine
aggccgtgcataaggctgtggttttagagctagaaatagcaagttaaaataaggctagtccgttatcaacttgaaaaagtggcaccgagtcggtgctttctcgtcgatggtcagcacagccttatgcacggcc

SEQ ID NO: 24591 - RNA, 132 nt, synthetic construct
  source 1..132: mol_type = other RNA
  modified_base 1: mod_base = OTHER; note = 2'O-methyl adenosine phosphorothioate
  modified_base 2: mod_base = OTHER; note = 2'O-methyl guanosine phosphorothioate
  modified_base 3: mod_base = OTHER; note = 2'O-methyl guanosine phosphorothioate
  modified_base 129: mod_base = OTHER; note = cytidine phosphorothioate
  modified_base 130: mod_base = OTHER; note = 2'O-methyl guanosine phosphorothioate
  modified_base 131: mod_base = OTHER; note = 2'O-methyl guanosine phosphorothioate
  modified_base 132: mod_base = OTHER; note = 2'O-methyl cytidine
aggccgtgcataaggctgtggttttagagctagaaatagcaagttaaaataaggctagtccgttatcaacttgaaaaagtggcaccgagtcggtgctttctcgtcgatggtcagcacagccttatgcacggc

SEQ ID NO: 24592 - RNA, 131 nt, synthetic construct
  source 1..131: mol_type = other RNA
  modified_base 1: mod_base = OTHER; note = 2'O-methyl adenosine phosphorothioate
  modified_base 2: mod_base = OTHER; note = 2'O-methyl guanosine phosphorothioate
  modified_base 3: mod_base = OTHER; note = 2'O-methyl guanosine phosphorothioate
  modified_base 128: mod_base = OTHER; note = adenosine phosphorothioate
  modified_base 129: mod_base = OTHER; note = 2'O-methyl cytidine phosphorothioate
  modified_base 130: mod_base = OTHER; note = 2'O-methyl guanosine phosphorothioate
  modified_base 131: mod_base = OTHER; note = 2'O-methyl guanosine
aggccgtgcataaggctgtggttttagagctagaaatagcaagttaaaataaggctagtccgttatcaacttgaaaaagtggcaccgagtcggtgctttctcgtcgatggtcagcacagccttatgcacgg

SEQ ID NO: 24593 - RNA, 130 nt, synthetic construct
  source 1..130: mol_type = other RNA
  modified_base 1: mod_base = OTHER; note = 2'O-methyl adenosine phosphorothioate
  modified_base 2: mod_base = OTHER; note = 2'O-methyl guanosine phosphorothioate
  modified_base 3: mod_base = OTHER; note = 2'O-methyl guanosine phosphorothioate
  modified_base 127: mod_base = OTHER; note = cytidine phosphorothioate
  modified_base 128: mod_base = OTHER; note = 2'O-methyl adenosine phosphorothioate
  modified_base 129: mod_base = OTHER; note = 2'O-methyl cytidine phosphorothioate
  modified_base 130: mod_base = OTHER; note = 2'O-methyl guanosine
aggccgtgcataaggctgtggttttagagctagaaatagcaagttaaaataaggctagtccgttatcaacttgaaaaagtggcaccgagtcggtgctttctcgtcgatggtcagcacagccttatgcacg

SEQ ID NO: 24594 - RNA, 129 nt, synthetic construct
  source 1..129: mol_type = other RNA
  modified_base 1: mod_base = OTHER; note = 2'O-methyl adenosine phosphorothioate
  modified_base 2: mod_base = OTHER; note = 2'O-methyl guanosine phosphorothioate
  modified_base 3: mod_base = OTHER; note = 2'O-methyl guanosine phosphorothioate
  modified_base 126: mod_base = OTHER; note = guanosine phosphorothioate
  modified_base 127: mod_base = OTHER; note = 2'O-methyl cytidine phosphorothioate
  modified_base 128: mod_base = OTHER; note = 2'O-methyl adenosine phosphorothioate
  modified_base 129: mod_base = OTHER; note = 2'O-methyl cytidine
aggccgtgcataaggctgtggttttagagctagaaatagcaagttaaaataaggctagtccgttatcaacttgaaaaagtggcaccgagtcggtgctttctcgtcgatggtcagcacagccttatgcac

SEQ ID NO: 24595 - RNA, 128 nt, synthetic construct
  source 1..128: mol_type = other RNA
  modified_base 1: mod_base = OTHER; note = 2'O-methyl adenosine phosphorothioate
  modified_base 2: mod_base = OTHER; note = 2'O-methyl guanosine phosphorothioate
  modified_base 3: mod_base = OTHER; note = 2'O-methyl guanosine phosphorothioate
  modified_base 125: mod_base = OTHER; note = uridine phosphorothioate
  modified_base 126: mod_base = OTHER; note = 2'O-methyl guanosine phosphorothioate
  modified_base 127: mod_base = OTHER; note = 2'O-methyl cytidine phosphorothioate
  modified_base 128: mod_base = OTHER; note = 2'O-methyl adenosine
aggccgtgcataaggctgtggttttagagctagaaatagcaagttaaaataaggctagtccgttatcaacttgaaaaagtggcaccgagtcggtgctttctcgtcgatggtcagcacagccttatgca

SEQ ID NO: 24596 - RNA, 127 nt, synthetic construct
  source 1..127: mol_type = other RNA
  modified_base 1: mod_base = OTHER; note = 2'O-methyl adenosine phosphorothioate
  modified_base 2: mod_base = OTHER; note = 2'O-methyl guanosine phosphorothioate
  modified_base 3: mod_base = OTHER; note = 2'O-methyl guanosine phosphorothioate
  modified_base 124: mod_base = OTHER; note = adenosine phosphorothioate
  modified_base 125: mod_base = OTHER; note = 2'O-methyl uridine phosphorothioate
  modified_base 126: mod_base = OTHER; note = 2'O-methyl guanosine phosphorothioate
  modified_base 127: mod_base = OTHER; note = 2'O-methyl cytidine
aggccgtgcataaggctgtggttttagagctagaaatagcaagttaaaataaggctagtccgttatcaacttgaaaaagtggcaccgagtcggtgctttctcgtcgatggtcagcacagccttatgc

SEQ ID NO: 24597 - RNA, 126 nt, synthetic construct
  source 1..126: mol_type = other RNA
  modified_base 1: mod_base = OTHER; note = 2'O-methyl adenosine phosphorothioate
  modified_base 2: mod_base = OTHER; note = 2'O-methyl guanosine phosphorothioate
  modified_base 3: mod_base = OTHER; note = 2'O-methyl guanosine phosphorothioate
  modified_base 123: mod_base = OTHER; note = uridine phosphorothioate
  modified_base 124: mod_base = OTHER; note = 2'O-methyl adenosine phosphorothioate
  modified_base 125: mod_base = OTHER; note = 2'O-methyl uridine phosphorothioate
  modified_base 126: mod_base = OTHER; note = 2'O-methyl guanosine
aggccgtgcataaggctgtggttttagagctagaaatagcaagttaaaataaggctagtccgttatcaacttgaaaaagtggcaccgagtcggtgctttctcgtcgatggtcagcacagccttatg

SEQ ID NO: 24598 - RNA, 125 nt, synthetic construct
  source 1..125: mol_type = other RNA
  modified_base 1: mod_base = OTHER; note = 2'O-methyl adenosine phosphorothioate
  modified_base 2: mod_base = OTHER; note = 2'O-methyl guanosine phosphorothioate
  modified_base 3: mod_base = OTHER; note = 2'O-methyl guanosine phosphorothioate
  modified_base 122: mod_base = OTHER; note = uridine phosphorothioate
  modified_base 123: mod_base = OTHER; note = 2'O-methyl uridine phosphorothioate
  modified_base 124: mod_base = OTHER; note = 2'O-methyl adenosine phosphorothioate
  modified_base 125: mod_base = OTHER; note = 2'O-methyl uridine
aggccgtgcataaggctgtggttttagagctagaaatagcaagttaaaataaggctagtccgttatcaacttgaaaaagtggcaccgagtcggtgctttctcgtcgatggtcagcacagccttat

SEQ ID NO: 24599 - RNA, 132 nt, synthetic construct
  source 1..132: mol_type = other RNA
  modified_base 1: mod_base = OTHER; note = 2'O-methyl adenosine phosphorothioate
  modified_base 2: mod_base = OTHER; note = 2'O-methyl guanosine phosphorothioate
  modified_base 3: mod_base = OTHER; note = 2'O-methyl guanosine phosphorothioate
  modified_base 129: mod_base = OTHER; note = guanosine phosphorothioate
  modified_base 130: mod_base = OTHER; note = 2'O-methyl cytidine phosphorothioate
  modified_base 131: mod_base = OTHER; note = 2'O-methyl cytidine phosphorothioate
  modified_base 132: mod_base = OTHER; note = 2'O-methyl uridine
aggccgtgcataaggctgtggttttagagctagaaatagcaagttaaaataaggctagtccgttatcaacttgaaaaagtggcaccgagtcggtgctctcgtcgatggtcagcacagccttatgcacggcct

SEQ ID NO: 24600 - RNA, 131 nt, synthetic construct
  source 1..131: mol_type = other RNA
  modified_base 1: mod_base = OTHER; note = 2'O-methyl adenosine phosphorothioate
  modified_base 2: mod_base = OTHER; note = 2'O-methyl guanosine phosphorothioate
  modified_base 3: mod_base = OTHER; note = 2'O-methyl guanosine phosphorothioate
  modified_base 128: mod_base = OTHER; note = guanosine phosphorothioate
  modified_base 129: mod_base = OTHER; note = 2'O-methyl guanosine phosphorothioate
  modified_base 130: mod_base = OTHER; note = 2'O-methyl cytidine phosphorothioate
  modified_base 131: mod_base = OTHER; note = 2'O-methyl cytidine
aggccgtgcataaggctgtggttttagagctagaaatagcaagttaaaataaggctagtccgttatcaacttgaaaaagtggcaccgagtcggtgctctcgtcgatggtcagcacagccttatgcacggcc

SEQ ID NO: 24601 - RNA, 130 nt, synthetic construct
  source 1..130: mol_type = other RNA
  modified_base 1: mod_base = OTHER; note = 2'O-methyl adenosine phosphorothioate
  modified_base 2: mod_base = OTHER; note = 2'O-methyl guanosine phosphorothioate
  modified_base 3: mod_base = OTHER; note = 2'O-methyl guanosine phosphorothioate
  modified_base 127: mod_base = OTHER; note = cytidine phosphorothioate
  modified_base 128: mod_base = OTHER; note = 2'O-methyl guanosine phosphorothioate
  modified_base 129: mod_base = OTHER; note = 2'O-methyl guanosine phosphorothioate
  modified_base 130: mod_base = OTHER; note = 2'O-methyl cytidine
aggccgtgcataaggctgtggttttagagctagaaatagcaagttaaaataaggctagtccgttatcaacttgaaaaagtggcaccgagtcggtgctctcgtcgatggtcagcacagccttatgcacggc

SEQ ID NO: 24602 - RNA, 129 nt, synthetic construct
  source 1..129: mol_type = other RNA
  modified_base 1: mod_base = OTHER; note = 2'O-methyl adenosine phosphorothioate
  modified_base 2: mod_base = OTHER; note = 2'O-methyl guanosine phosphorothioate
  modified_base 3: mod_base = OTHER; note = 2'O-methyl guanosine phosphorothioate
  modified_base 126: mod_base = OTHER; note = adenosine phosphorothioate
  modified_base 127: mod_base = OTHER; note = 2'O-methyl cytidine phosphorothioate
  modified_base 128: mod_base = OTHER; note = 2'O-methyl guanosine phosphorothioate
  modified_base 129: mod_base = OTHER; note = 2'O-methyl guanosine
aggccgtgcataaggctgtggttttagagctagaaatagcaagttaaaataaggctagtccgttatcaacttgaaaaagtggcaccgagtcggtgctctcgtcgatggtcagcacagccttatgcacgg

SEQ ID NO: 24603 - RNA, 128 nt, synthetic construct
  source 1..128: mol_type = other RNA
  modified_base 1: mod_base = OTHER; note = 2'O-methyl adenosine phosphorothioate
  modified_base 2: mod_base = OTHER; note = 2'O-methyl guanosine phosphorothioate
  modified_base 3: mod_base = OTHER; note = 2'O-methyl guanosine phosphorothioate
  modified_base 125: mod_base = OTHER; note = cytidine phosphorothioate
  modified_base 126: mod_base = OTHER; note = 2'O-methyl adenosine phosphorothioate
  modified_base 127: mod_base = OTHER; note = 2'O-methyl cytidine phosphorothioate
  modified_base 128: mod_base = OTHER; note = 2'O-methyl guanosine
aggccgtgcataaggctgtggttttagagctagaaatagcaagttaaaataaggctagtccgttatcaacttgaaaaagtggcaccgagtcggtgctctcgtcgatggtcagcacagccttatgcacg

SEQ ID NO: 24604 - RNA, 127 nt, synthetic construct
  source 1..127: mol_type = other RNA
  modified_base 1: mod_base = OTHER; note = 2'O-methyl adenosine phosphorothioate
  modified_base 2: mod_base = OTHER; note = 2'O-methyl guanosine phosphorothioate
  modified_base 3: mod_base = OTHER; note = 2'O-methyl guanosine phosphorothioate
  modified_base 124: mod_base = OTHER; note = guanosine phosphorothioate
  modified_base 125: mod_base = OTHER; note = 2'O-methyl cytidine phosphorothioate
  modified_base 126: mod_base = OTHER; note = 2'O-methyl adenosine phosphorothioate
  modified_base 127: mod_base = OTHER; note = 2'O-methyl cytidine
aggccgtgcataaggctgtggttttagagctagaaatagcaagttaaaataaggctagtccgttatcaacttgaaaaagtggcaccgagtcggtgctctcgtcgatggtcagcacagccttatgcac

SEQ ID NO: 24605 - RNA, 126 nt, synthetic construct
  source 1..126: mol_type = other RNA
  modified_base 1: mod_base = OTHER; note = 2'O-methyl adenosine phosphorothioate
  modified_base 2: mod_base = OTHER; note = 2'O-methyl guanosine phosphorothioate
  modified_base 3: mod_base = OTHER; note = 2'O-methyl guanosine phosphorothioate
  modified_base 123: mod_base = OTHER; note = uridine phosphorothioate
  modified_base 124: mod_base = OTHER; note = 2'O-methyl guanosine phosphorothioate
  modified_base 125: mod_base = OTHER; note = 2'O-methyl cytidine phosphorothioate
  modified_base 126: mod_base = OTHER; note = 2'O-methyl adenosine
aggccgtgcataaggctgtggttttagagctagaaatagcaagttaaaataaggctagtccgttatcaacttgaaaaagtggcaccgagtcggtgctctcgtcgatggtcagcacagccttatgca

SEQ ID NO: 24606 - RNA, 125 nt, synthetic construct
  source 1..125: mol_type = other RNA
  modified_base 1: mod_base = OTHER; note = 2'O-methyl adenosine phosphorothioate
  modified_base 2: mod_base = OTHER; note = 2'O-methyl guanosine phosphorothioate
  modified_base 3: mod_base = OTHER; note = 2'O-methyl guanosine phosphorothioate
  modified_base 122: mod_base = OTHER; note = adenosine phosphorothioate
  modified_base 123: mod_base = OTHER; note = 2'O-methyl uridine phosphorothioate
  modified_base 124: mod_base = OTHER; note = 2'O-methyl guanosine phosphorothioate
  modified_base 125: mod_base = OTHER; note = 2'O-methyl cytidine
aggccgtgcataaggctgtggttttagagctagaaatagcaagttaaaataaggctagtccgttatcaacttgaaaaagtggcaccgagtcggtgctctcgtcgatggtcagcacagccttatgc

SEQ ID NO: 24607 - RNA, 124 nt, synthetic construct
  source 1..124: mol_type = other RNA
  modified_base 1: mod_base = OTHER; note = 2'O-methyl adenosine phosphorothioate
  modified_base 2: mod_base = OTHER; note = 2'O-methyl guanosine phosphorothioate
  modified_base 3: mod_base = OTHER; note = 2'O-methyl guanosine phosphorothioate
  modified_base 121: mod_base = OTHER; note = uridine phosphorothioate
  modified_base 122: mod_base = OTHER; note = 2'O-methyl adenosine phosphorothioate
  modified_base 123: mod_base = OTHER; note = 2'O-methyl uridine phosphorothioate
  modified_base 124: mod_base = OTHER; note = 2'O-methyl guanosine
aggccgtgcataaggctgtggttttagagctagaaatagcaagttaaaataaggctagtccgttatcaacttgaaaaagtggcaccgagtcggtgctctcgtcgatggtcagcacagccttatg

SEQ ID NO: 24608 - RNA, 123 nt, synthetic construct
  source 1..123: mol_type = other RNA
  modified_base 1: mod_base = OTHER; note = 2'O-methyl adenosine phosphorothioate
  modified_base 2: mod_base = OTHER; note = 2'O-methyl guanosine phosphorothioate
  modified_base 3: mod_base = OTHER; note = 2'O-methyl guanosine phosphorothioate
  modified_base 120: mod_base = OTHER; note = uridine phosphorothioate
  modified_base 121: mod_base = OTHER; note = 2'O-methyl uridine phosphorothioate
  modified_base 122: mod_base = OTHER; note = 2'O-methyl adenosine phosphorothioate
  modified_base 123: mod_base = OTHER; note = 2'O-methyl uridine
aggccgtgcataaggctgtggttttagagctagaaatagcaagttaaaataaggctagtccgttatcaacttgaaaaagtggcaccgagtcggtgctctcgtcgatggtcagcacagccttat

SEQ ID NO: 24609 - RNA, 181 nt, synthetic construct
  source 1..181: mol_type = other RNA
  modified_base 1: mod_base = OTHER; note = 2'O-methyl uridine phosphorothioate
  modified_base 2: mod_base = OTHER; note = 2'O-methyl cytidine phosphorothioate
  modified_base 3: mod_base = OTHER; note = 2'O-methyl cytidine phosphorothioate
  modified_base 178: mod_base = OTHER; note = guanosine phosphorothioate
  modified_base 179: mod_base = OTHER; note = 2'O-methyl cytidine phosphorothioate
  modified_base 180: mod_base = OTHER; note = 2'O-methyl cytidine phosphorothioate
  modified_base 181: mod_base = OTHER; note = 2'O-methyl uridine
tccaggccgtgcataaggctgtggttgtagctcccgaaacgttgctacaataaggccgtctgaaaagatgtgccgcaacgctctgccccttaaagcttctgctttaaggggcatcgttacatggccccagcagcttcagtccctttctcgtcgatggtcagcacagccttatgcacggcct

SEQ ID NO: 24610 - RNA, 180 nt, synthetic construct
  source 1..180: mol_type = other RNA
  modified_base 1: mod_base = OTHER; note = 2'O-methyl uridine phosphorothioate
  modified_base 2: mod_base = OTHER; note = 2'O-methyl cytidine phosphorothioate
  modified_base 3: mod_base = OTHER; note = 2'O-methyl cytidine phosphorothioate
  modified_base 177: mod_base = OTHER; note = guanosine phosphorothioate
  modified_base 178: mod_base = OTHER; note = 2'O-methyl guanosine phosphorothioate
  modified_base 179: mod_base = OTHER; note = 2'O-methyl cytidine phosphorothioate
  modified_base 180: mod_base = OTHER; note = 2'O-methyl cytidine
tccaggccgtgcataaggctgtggttgtagctcccgaaacgttgctacaataaggccgtctgaaaagatgtgccgcaacgctctgccccttaaagcttctgctttaaggggcatcgttacatggccccagcagcttcagtccctttctcgtcgatggtcagcacagccttatgcacggcc

SEQ ID NO: 24611 - RNA, 179 nt, synthetic construct
  source 1..179: mol_type = other RNA
  modified_base 1: mod_base = OTHER; note = 2'O-methyl uridine phosphorothioate
  modified_base 2: mod_base = OTHER; note = 2'O-methyl cytidine phosphorothioate
  modified_base 3: mod_base = OTHER; note = 2'O-methyl cytidine phosphorothioate
  modified_base 176: mod_base = OTHER; note = cytidine phosphorothioate
  modified_base 177: mod_base = OTHER; note = 2'O-methyl guanosine phosphorothioate
  modified_base 178: mod_base = OTHER; note = 2'O-methyl guanosine phosphorothioate
  modified_base 179: mod_base = OTHER; note = 2'O-methyl cytidine
tccaggccgtgcataaggctgtggttgtagctcccgaaacgttgctacaataaggccgtctgaaaagatgtgccgcaacgctctgccccttaaagcttctgctttaaggggcatcgttacatggccccagcagcttcagtccctttctcgtcgatggtcagcacagccttatgcacggc

SEQ ID NO: 24612 - RNA, 178 nt, synthetic construct
  source 1..178: mol_type = other RNA
  modified_base 1: mod_base = OTHER; note = 2'O-methyl uridine phosphorothioate
  modified_base 2: mod_base = OTHER; note = 2'O-methyl cytidine phosphorothioate
  modified_base 3: mod_base = OTHER; note = 2'O-methyl cytidine phosphorothioate
  modified_base 175: mod_base = OTHER; note = adenosine phosphorothioate
  modified_base 176: mod_base = OTHER; note = 2'O-methyl cytidine phosphorothioate
  modified_base 177: mod_base = OTHER; note = 2'O-methyl guanosine phosphorothioate
  modified_base 178: mod_base = OTHER; note = 2'O-methyl guanosine
tccaggccgtgcataaggctgtggttgtagctcccgaaacgttgctacaataaggccgtctgaaaagatgtgccgcaacgctctgccccttaaagcttctgctttaaggggcatcgttacatggccccagcagcttcagtccctttctcgtcgatggtcagcacagccttatgcacgg

SEQ ID NO: 24613 - RNA, 177 nt, synthetic construct
  source 1..177: mol_type = other RNA
  modified_base 1: mod_base = OTHER; note = 2'O-methyl uridine phosphorothioate
  modified_base 2: mod_base = OTHER; note = 2'O-methyl cytidine phosphorothioate
  modified_base 3: mod_base = OTHER; note = 2'O-methyl cytidine phosphorothioate
  modified_base 174: mod_base = OTHER; note = cytidine phosphorothioate
  modified_base 175: mod_base = OTHER; note = 2'O-methyl adenosine phosphorothioate
  modified_base 176: mod_base = OTHER; note = 2'O-methyl cytidine phosphorothioate
  modified_base 177: mod_base = OTHER; note = 2'O-methyl guanosine
tccaggccgtgcataaggctgtggttgtagctcccgaaacgttgctacaataaggccgtctgaaaagatgtgccgcaacgctctgccccttaaagcttctgctttaaggggcatcgttacatggccccagcagcttcagtccctttctcgtcgatggtcagcacagccttatgcacg

SEQ ID NO: 24614 - RNA, 176 nt, synthetic construct
  source 1..176: mol_type = other RNA
  modified_base 1: mod_base = OTHER; note = 2'O-methyl uridine phosphorothioate
  modified_base 2: mod_base = OTHER; note = 2'O-methyl cytidine phosphorothioate
  modified_base 3: mod_base = OTHER; note = 2'O-methyl cytidine phosphorothioate
  modified_base 173: mod_base = OTHER; note = guanosine phosphorothioate
  modified_base 174: mod_base = OTHER; note = 2'O-methyl cytidine phosphorothioate
  modified_base 175: mod_base = OTHER; note = 2'O-methyl adenosine phosphorothioate
  modified_base 176: mod_base = OTHER; note = 2'O-methyl cytidine
tccaggccgtgcataaggctgtggttgtagctcccgaaacgttgctacaataaggccgtctgaaaagatgtgccgcaacgctctgccccttaaagcttctgctttaaggggcatcgttacatggccccagcagcttcagtccctttctcgtcgatggtcagcacagccttatgcac

SEQ ID NO: 24615 - RNA, 175 nt, synthetic construct
  source 1..175: mol_type = other RNA
  modified_base 1: mod_base = OTHER; note = 2'O-methyl uridine phosphorothioate
  modified_base 2: mod_base = OTHER; note = 2'O-methyl cytidine phosphorothioate
  modified_base 3: mod_base = OTHER; note = 2'O-methyl cytidine phosphorothioate
  modified_base 172: mod_base = OTHER; note = uridine phosphorothioate
  modified_base 173: mod_base = OTHER; note = 2'O-methyl guanosine phosphorothioate
  modified_base 174: mod_base = OTHER; note = 2'O-methyl cytidine phosphorothioate
  modified_base 175: mod_base = OTHER; note = 2'O-methyl adenosine
tccaggccgtgcataaggctgtggttgtagctcccgaaacgttgctacaataaggccgtctgaaaagatgtgccgcaacgctctgccccttaaagcttctgctttaaggggcatcgttacatggccccagcagcttcagtccctttctcgtcgatggtcagcacagccttatgca

SEQ ID NO: 24616 - RNA, 174 nt, synthetic construct
  source 1..174: mol_type = other RNA
  modified_base 1: mod_base = OTHER; note = 2'O-methyl uridine phosphorothioate
  modified_base 2: mod_base = OTHER; note = 2'O-methyl cytidine phosphorothioate
  modified_base 3: mod_base = OTHER; note = 2'O-methyl cytidine phosphorothioate
  modified_base 171: mod_base = OTHER; note = adenosine phosphorothioate
  modified_base 172: mod_base = OTHER; note = 2'O-methyl uridine phosphorothioate
  modified_base 173: mod_base = OTHER; note = 2'O-methyl guanosine phosphorothioate
  modified_base 174: mod_base = OTHER; note = 2'O-methyl cytidine
tccaggccgtgcataaggctgtggttgtagctcccgaaacgttgctacaataaggccgtctgaaaagatgtgccgcaacgctctgccccttaaagcttctgctttaaggggcatcgttacatggccccagcagcttcagtccctttctcgtcgatggtcagcacagccttatgc

SEQ ID NO: 24617 - RNA, 173 nt, synthetic construct
  source 1..173: mol_type = other RNA
  modified_base 1: mod_base = OTHER; note = 2'O-methyl uridine phosphorothioate
  modified_base 2: mod_base = OTHER; note = 2'O-methyl cytidine phosphorothioate
  modified_base 3: mod_base = OTHER; note = 2'O-methyl cytidine phosphorothioate
  modified_base 170: mod_base = OTHER; note = uridine phosphorothioate
  modified_base 171: mod_base = OTHER; note = 2'O-methyl adenosine phosphorothioate
  modified_base 172: mod_base = OTHER; note = 2'O-methyl uridine phosphorothioate
  modified_base 173: mod_base = OTHER; note = 2'O-methyl guanosine
tccaggccgtgcataaggctgtggttgtagctcccgaaacgttgctacaataaggccgtctgaaaagatgtgccgcaacgctctgccccttaaagcttctgctttaaggggcatcgttacatggccccagcagcttcagtccctttctcgtcgatggtcagcacagccttatg

SEQ ID NO: 24618 - RNA, 172 nt, synthetic construct
  source 1..172: mol_type = other RNA
  modified_base 1: mod_base = OTHER; note = 2'O-methyl uridine phosphorothioate
  modified_base 2: mod_base = OTHER; note = 2'O-methyl cytidine phosphorothioate
  modified_base 3: mod_base = OTHER; note = 2'O-methyl cytidine phosphorothioate
  modified_base 169: mod_base = OTHER; note = uridine phosphorothioate
  modified_base 170: mod_base = OTHER; note = 2'O-methyl uridine phosphorothioate
  modified_base 171: mod_base = OTHER; note = 2'O-methyl adenosine phosphorothioate
  modified_base 172: mod_base = OTHER; note = 2'O-methyl uridine
tccaggccgtgcataaggctgtggttgtagctcccgaaacgttgctacaataaggccgtctgaaaagatgtgccgcaacgctctgccccttaaagcttctgctttaaggggcatcgttacatggccccagcagcttcagtccctttctcgtcgatggtcagcacagccttat

SEQ ID NO: 24619 - RNA, 176 nt, synthetic construct
  source 1..176: mol_type = other RNA
  modified_base 1: mod_base = OTHER; note = 2'O-methyl uridine phosphorothioate
  modified_base 2: mod_base = OTHER; note = 2'O-methyl cytidine phosphorothioate
  modified_base 3: mod_base = OTHER; note = 2'O-methyl cytidine phosphorothioate
  modified_base 173: mod_base = OTHER; note = guanosine phosphorothioate
  modified_base 174: mod_base = OTHER; note = 2'O-methyl cytidine phosphorothioate
  modified_base 175: mod_base = OTHER; note = 2'O-methyl cytidine phosphorothioate
  modified_base 176: mod_base = OTHER; note = 2'O-methyl uridine
tccaggccgtgcataaggctgtggttgtagctcccgaaacgttgctacaataaggccgtctgaaaagatgtgccgcaacgctctgccccttaaagcttctgctttaaggggcatcgttgccccagcagcttcagtccctttctcgtcgatggtcagcacagccttatgcacggcct

SEQ ID NO: 24620 - RNA, 175 nt, synthetic construct
  source 1..175: mol_type = other RNA
  modified_base 1: mod_base = OTHER; note = 2'O-methyl uridine phosphorothioate
  modified_base 2: mod_base = OTHER; note = 2'O-methyl cytidine phosphorothioate
  modified_base 3: mod_base = OTHER; note = 2'O-methyl cytidine phosphorothioate
  modified_base 172: mod_base = OTHER; note = guanosine phosphorothioate
  modified_base 173: mod_base = OTHER; note = 2'O-methyl guanosine phosphorothioate
  modified_base 174: mod_base = OTHER; note = 2'O-methyl cytidine phosphorothioate
  modified_base 175: mod_base = OTHER; note = 2'O-methyl cytidine
tccaggccgtgcataaggctgtggttgtagctcccgaaacgttgctacaataaggccgtctgaaaagatgtgccgcaacgctctgccccttaaagcttctgctttaaggggcatcgttgccccagcagcttcagtccctttctcgtcgatggtcagcacagccttatgcacggcc

SEQ ID NO: 24621 - RNA, 174 nt, synthetic construct
  source 1..174: mol_type = other RNA
  modified_base 1: mod_base = OTHER; note = 2'O-methyl uridine phosphorothioate
  modified_base 2: mod_base = OTHER; note = 2'O-methyl cytidine phosphorothioate
  modified_base 3: mod_base = OTHER; note = 2'O-methyl cytidine phosphorothioate
  modified_base 171: mod_base = OTHER; note = cytidine phosphorothioate
  modified_base 172: mod_base = OTHER; note = 2'O-methyl guanosine phosphorothioate
  modified_base 173: mod_base = OTHER; note = 2'O-methyl guanosine phosphorothioate
  modified_base 174: mod_base = OTHER; note = 2'O-methyl cytidine
tccaggccgtgcataaggctgtggttgtagctcccgaaacgttgctacaataaggccgtctgaaaagatgtgccgcaacgctctgccccttaaagcttctgctttaaggggcatcgttgccccagcagcttcagtccctttctcgtcgatggtcagcacagccttatgcacggc

SEQ ID NO: 24622 - RNA, 173 nt, synthetic construct
  source 1..173: mol_type = other RNA
  modified_base 1: mod_base = OTHER; note = 2'O-methyl uridine phosphorothioate
  modified_base 2: mod_base = OTHER; note = 2'O-methyl cytidine phosphorothioate
  modified_base 3: mod_base = OTHER; note = 2'O-methyl cytidine phosphorothioate
  modified_base 170: mod_base = OTHER; note = adenosine phosphorothioate
  modified_base 171: mod_base = OTHER; note = 2'O-methyl cytidine phosphorothioate
  modified_base 172: mod_base = OTHER; note = 2'O-methyl guanosine phosphorothioate
  modified_base 173: mod_base = OTHER; note = 2'O-methyl guanosine
tccaggccgtgcataaggctgtggttgtagctcccgaaacgttgctacaataaggccgtctgaaaagatgtgccgcaacgctctgccccttaaagcttctgctttaaggggcatcgttgccccagcagcttcagtccctttctcgtcgatggtcagcacagccttatgcacgg

SEQ ID NO: 24623 - RNA, 172 nt, synthetic construct
  source 1..172: mol_type = other RNA
  modified_base 1: mod_base = OTHER; note = 2'O-methyl uridine phosphorothioate
  modified_base 2: mod_base = OTHER; note = 2'O-methyl cytidine phosphorothioate
  modified_base 3: mod_base = OTHER; note = 2'O-methyl cytidine phosphorothioate
  modified_base 169: mod_base = OTHER; note = cytidine phosphorothioate
  modified_base 170: mod_base = OTHER; note = 2'O-methyl adenosine phosphorothioate
  modified_base 171: mod_base = OTHER; note = 2'O-methyl cytidine phosphorothioate
  modified_base 172: mod_base = OTHER; note = 2'O-methyl guanosine
tccaggccgtgcataaggctgtggttgtagctcccgaaacgttgctacaataaggccgtctgaaaagatgtgccgcaacgctctgccccttaaagcttctgctttaaggggcatcgttgccccagcagcttcagtccctttctcgtcgatggtcagcacagccttatgcacg

SEQ ID NO: 24624 - RNA, 171 nt, synthetic construct
  source 1..171: mol_type = other RNA
  modified_base 1: mod_base = OTHER; note = 2'O-methyl uridine phosphorothioate
  modified_base 2: mod_base = OTHER; note = 2'O-methyl cytidine phosphorothioate
  modified_base 3: mod_base = OTHER; note = 2'O-methyl cytidine phosphorothioate
  modified_base 168: mod_base = OTHER; note = guanosine phosphorothioate
  modified_base 169: mod_base = OTHER; note = 2'O-methyl cytidine phosphorothioate
  modified_base 170: mod_base = OTHER; note = 2'O-methyl adenosine phosphorothioate
  modified_base 171: mod_base = OTHER; note = 2'O-methyl cytidine
tccaggccgtgcataaggctgtggttgtagctcccgaaacgttgctacaataaggccgtctgaaaagatgtgccgcaacgctctgccccttaaagcttctgctttaaggggcatcgttgccccagcagcttcagtccctttctcgtcgatggtcagcacagccttatgcac

SEQ ID NO: 24625 - RNA, 170 nt, synthetic construct
  source 1..170: mol_type = other RNA
  modified_base 1: mod_base = OTHER; note = 2'O-methyl uridine phosphorothioate
  modified_base 2: mod_base = OTHER; note = 2'O-methyl cytidine phosphorothioate
  modified_base 3: mod_base = OTHER; note = 2'O-methyl cytidine phosphorothioate
  modified_base 167: mod_base = OTHER; note = uridine phosphorothioate
  modified_base 168: mod_base = OTHER; note = 2'O-methyl guanosine phosphorothioate
  modified_base 169: mod_base = OTHER; note = 2'O-methyl cytidine phosphorothioate
  modified_base 170: mod_base = OTHER; note = 2'O-methyl adenosine
tccaggccgtgcataaggctgtggttgtagctcccgaaacgttgctacaataaggccgtctgaaaagatgtgccgcaacgctctgccccttaaagcttctgctttaaggggcatcgttgccccagcagcttcagtccctttctcgtcgatggtcagcacagccttatgca

SEQ ID NO: 24626 - RNA, 169 nt, synthetic construct
  source 1..169: mol_type = other RNA
  modified_base 1: mod_base = OTHER; note = 2'O-methyl uridine phosphorothioate
  modified_base 2: mod_base = OTHER; note = 2'O-methyl cytidine phosphorothioate
  modified_base 3: mod_base = OTHER; note = 2'O-methyl cytidine phosphorothioate
  modified_base 166: mod_base = OTHER; note = adenosine phosphorothioate
  modified_base 167: mod_base = OTHER; note = 2'O-methyl uridine phosphorothioate
  modified_base 168: mod_base = OTHER; note = 2'O-methyl guanosine phosphorothioate
  modified_base 169: mod_base = OTHER; note = 2'O-methyl cytidine
tccaggccgtgcataaggctgtggttgtagctcccgaaacgttgctacaataaggccgtctgaaaagatgtgccgcaacgctctgccccttaaagcttctgctttaaggggcatcgttgccccagcagcttcagtccctttctcgtcgatggtcagcacagccttatgc

SEQ ID NO: 24627 - RNA, 168 nt, synthetic construct
  source 1..168: mol_type = other RNA
  modified_base 1: mod_base = OTHER; note = 2'O-methyl uridine phosphorothioate
  modified_base 2: mod_base = OTHER; note = 2'O-methyl cytidine phosphorothioate
  modified_base 3: mod_base = OTHER; note = 2'O-methyl cytidine phosphorothioate
  modified_base 165: mod_base = OTHER; note = uridine phosphorothioate
  modified_base 166: mod_base = OTHER; note = 2'O-methyl adenosine phosphorothioate
  modified_base 167: mod_base = OTHER; note = 2'O-methyl uridine phosphorothioate
  modified_base 168: mod_base = OTHER; note = 2'O-methyl guanosine
tccaggccgtgcataaggctgtggttgtagctcccgaaacgttgctacaataaggccgtctgaaaagatgtgccgcaacgctctgccccttaaagcttctgctttaaggggcatcgttgccccagcagcttcagtccctttctcgtcgatggtcagcacagccttatg

SEQ ID NO: 24628 - RNA, 167 nt, synthetic construct
  source 1..167: mol_type = other RNA
  modified_base 1: mod_base = OTHER; note = 2'O-methyl uridine phosphorothioate
  modified_base 2: mod_base = OTHER; note = 2'O-methyl cytidine phosphorothioate
  modified_base 3: mod_base = OTHER; note = 2'O-methyl cytidine phosphorothioate
  modified_base 164: mod_base = OTHER; note = uridine phosphorothioate
  modified_base 165: mod_base = OTHER; note = 2'O-methyl uridine phosphorothioate
  modified_base 166: mod_base = OTHER; note = 2'O-methyl adenosine phosphorothioate
  modified_base 167: mod_base = OTHER; note = 2'O-methyl uridine
tccaggccgtgcataaggctgtggttgtagctcccgaaacgttgctacaataaggccgtctgaaaagatgtgccgcaacgctctgccccttaaagcttctgctttaaggggcatcgttgccccagcagcttcagtccctttctcgtcgatggtcagcacagccttat

SEQ ID NO: 24629 - RNA, 171 nt, synthetic construct
  source 1..171: mol_type = other RNA
  modified_base 1: mod_base = OTHER; note = 2'O-methyl uridine phosphorothioate
  modified_base 2: mod_base = OTHER; note = 2'O-methyl cytidine phosphorothioate
  modified_base 3: mod_base = OTHER; note = 2'O-methyl cytidine phosphorothioate
  modified_base 168: mod_base = OTHER; note = guanosine phosphorothioate
  modified_base 169: mod_base = OTHER; note = 2'O-methyl cytidine phosphorothioate
  modified_base 170: mod_base = OTHER; note = 2'O-methyl cytidine phosphorothioate
  modified_base 171: mod_base = OTHER; note = 2'O-methyl uridine
tccaggccgtgcataaggctgtggttgtagctcccgaaacgttgctacaataaggccgtctgaaaagatgtgccgcaacgctctgccccttaaagcttctgctttaaggggcatcgttagcagcttcagtccctttctcgtcgatggtcagcacagccttatgcacggcct

SEQ ID NO: 24630 - RNA, 170 nt, synthetic construct
  source 1..170: mol_type = other RNA
  modified_base 1: mod_base = OTHER; note = 2'O-methyl uridine phosphorothioate
  modified_base 2: mod_base = OTHER; note = 2'O-methyl cytidine phosphorothioate
  modified_base 3: mod_base = OTHER; note = 2'O-methyl cytidine phosphorothioate
  modified_base 167: mod_base = OTHER; note = guanosine phosphorothioate
  modified_base 168: mod_base = OTHER; note = 2'O-methyl guanosine phosphorothioate
  modified_base 169: mod_base = OTHER; note = 2'O-methyl cytidine phosphorothioate
  modified_base 170: mod_base = OTHER; note = 2'O-methyl cytidine
tccaggccgtgcataaggctgtggttgtagctcccgaaacgttgctacaataaggccgtctgaaaagatgtgccgcaacgctctgccccttaaagcttctgctttaaggggcatcgttagcagcttcagtccctttctcgtcgatggtcagcacagccttatgcacggcc

SEQ ID NO: 24631 - RNA, 169 nt, synthetic construct
  source 1..169: mol_type = other RNA
  modified_base 1: mod_base = OTHER; note = 2'O-methyl uridine phosphorothioate
  modified_base 2: mod_base = OTHER; note = 2'O-methyl cytidine phosphorothioate
  modified_base 3: mod_base = OTHER; note = 2'O-methyl cytidine phosphorothioate
  modified_base 166: mod_base = OTHER; note = cytidine phosphorothioate
  modified_base 167: mod_base = OTHER; note = 2'O-methyl guanosine phosphorothioate
  modified_base 168: mod_base = OTHER; note = 2'O-methyl guanosine phosphorothioate
  modified_base 169: mod_base = OTHER; note = 2'O-methyl cytidine
tccaggccgtgcataaggctgtggttgtagctcccgaaacgttgctacaataaggccgtctgaaaagatgtgccgcaacgctctgccccttaaagcttctgctttaaggggcatcgttagcagcttcagtccctttctcgtcgatggtcagcacagccttatgcacggc

SEQ ID NO: 24632 - RNA, 168 nt, synthetic construct
  source 1..168: mol_type = other RNA
  modified_base 1: mod_base = OTHER; note = 2'O-methyl uridine phosphorothioate
  modified_base 2: mod_base = OTHER; note = 2'O-methyl cytidine phosphorothioate
  modified_base 3: mod_base = OTHER; note = 2'O-methyl cytidine phosphorothioate
  modified_base 165: mod_base = OTHER; note = adenosine phosphorothioate
  modified_base 166: mod_base = OTHER; note = 2'O-methyl cytidine phosphorothioate
  modified_base 167: mod_base = OTHER; note = 2'O-methyl guanosine phosphorothioate
  modified_base 168: mod_base = OTHER; note = 2'O-methyl guanosine
tccaggccgtgcataaggctgtggttgtagctcccgaaacgttgctacaataaggccgtctgaaaagatgtgccgcaacgctctgccccttaaagcttctgctttaaggggcatcgttagcagcttcagtccctttctcgtcgatggtcagcacagccttatgcacgg

SEQ ID NO: 24633 - RNA, 167 nt, synthetic construct
  source 1..167: mol_type = other RNA
  modified_base 1: mod_base = OTHER; note = 2'O-methyl uridine phosphorothioate
  modified_base 2: mod_base = OTHER; note = 2'O-methyl cytidine phosphorothioate
  modified_base 3: mod_base = OTHER; note = 2'O-methyl cytidine phosphorothioate
  modified_base 164: mod_base = OTHER; note = cytidine phosphorothioate
  modified_base 165: mod_base = OTHER; note = 2'O-methyl adenosine phosphorothioate
  modified_base 166: mod_base = OTHER; note = 2'O-methyl cytidine phosphorothioate
  modified_base 167: mod_base = OTHER; note = 2'O-methyl guanosine
tccaggccgtgcataaggctgtggttgtagctcccgaaacgttgctacaataaggccgtctgaaaagatgtgccgcaacgctctgccccttaaagcttctgctttaaggggcatcgttagcagcttcagtccctttctcgtcgatggtcagcacagccttatgcacg

SEQ ID NO: 24634 - RNA, 166 nt, synthetic construct
  source 1..166: mol_type = other RNA
  modified_base 1: mod_base = OTHER; note = 2'O-methyl uridine phosphorothioate
  modified_base 2: mod_base = OTHER; note = 2'O-methyl cytidine phosphorothioate
  modified_base 3: mod_base = OTHER; note = 2'O-methyl cytidine phosphorothioate
  modified_base 163: mod_base = OTHER; note = guanosine phosphorothioate
  modified_base 164: mod_base = OTHER; note = 2'O-methyl cytidine phosphorothioate
  modified_base 165: mod_base = OTHER; note = 2'O-methyl adenosine phosphorothioate
  modified_base 166: mod_base = OTHER; note = 2'O-methyl cytidine
tccaggccgtgcataaggctgtggttgtagctcccgaaacgttgctacaataaggccgtctgaaaagatgtgccgcaacgctctgccccttaaagcttctgctttaaggggcatcgttagcagcttcagtccctttctcgtcgatggtcagcacagccttatgcac

SEQ ID NO: 24635 - RNA, 165 nt, synthetic construct
  source 1..165: mol_type = other RNA
  modified_base 1: mod_base = OTHER; note = 2'O-methyl uridine phosphorothioate
  modified_base 2: mod_base = OTHER; note = 2'O-methyl cytidine phosphorothioate
  modified_base 3: mod_base = OTHER; note = 2'O-methyl cytidine phosphorothioate
  modified_base 162: mod_base = OTHER; note = uridine phosphorothioate
  modified_base 163: mod_base = OTHER; note = 2'O-methyl guanosine phosphorothioate
  modified_base 164: mod_base = OTHER; note = 2'O-methyl cytidine phosphorothioate
  modified_base 165: mod_base = OTHER; note = 2'O-methyl adenosine
tccaggccgtgcataaggctgtggttgtagctcccgaaacgttgctacaataaggccgtctgaaaagatgtgccgcaacgctctgccccttaaagcttctgctttaaggggcatcgttagcagcttcagtccctttctcgtcgatggtcagcacagccttatgca

SEQ ID NO: 24636 - RNA, 164 nt, synthetic construct
  source 1..164: mol_type = other RNA
  modified_base 1: mod_base = OTHER; note = 2'O-methyl uridine phosphorothioate
  modified_base 2: mod_base = OTHER; note = 2'O-methyl cytidine phosphorothioate
  modified_base 3: mod_base = OTHER; note = 2'O-methyl cytidine phosphorothioate
  modified_base 161: mod_base = OTHER; note = adenosine phosphorothioate
  modified_base 162: mod_base = OTHER; note = 2'O-methyl uridine phosphorothioate
  modified_base 163: mod_base = OTHER; note = 2'O-methyl guanosine phosphorothioate
  modified_base 164: mod_base = OTHER; note = 2'O-methyl cytidine
tccaggccgtgcataaggctgtggttgtagctcccgaaacgttgctacaataaggccgtctgaaaagatgtgccgcaacgctctgccccttaaagcttctgctttaaggggcatcgttagcagcttcagtccctttctcgtcgatggtcagcacagccttatgc

SEQ ID NO: 24637 - RNA, 163 nt, synthetic construct
  source 1..163: mol_type = other RNA
  modified_base 1: mod_base = OTHER; note = 2'O-methyl uridine phosphorothioate
  modified_base 2: mod_base = OTHER; note = 2'O-methyl cytidine phosphorothioate
  modified_base 3: mod_base = OTHER; note = 2'O-methyl cytidine phosphorothioate
  modified_base 160: mod_base = OTHER; note = uridine phosphorothioate
  modified_base 161: mod_base = OTHER; note = 2'O-methyl adenosine phosphorothioate
  modified_base 162: mod_base = OTHER; note = 2'O-methyl uridine phosphorothioate
  modified_base 163: mod_base = OTHER; note = 2'O-methyl guanosine
tccaggccgtgcataaggctgtggttgtagctcccgaaacgttgctacaataaggccgtctgaaaagatgtgccgcaacgctctgccccttaaagcttctgctttaaggggcatcgttagcagcttcagtccctttctcgtcgatggtcagcacagccttatg

SEQ ID NO: 24638 - RNA, 162 nt, synthetic construct
  source 1..162: mol_type = other RNA
  modified_base 1: mod_base = OTHER; note = 2'O-methyl uridine phosphorothioate
  modified_base 2: mod_base = OTHER; note = 2'O-methyl cytidine phosphorothioate
  modified_base 3: mod_base = OTHER; note = 2'O-methyl cytidine phosphorothioate
  modified_base 159: mod_base = OTHER; note = uridine phosphorothioate
  modified_base 160: mod_base = OTHER; note = 2'O-methyl uridine phosphorothioate
  modified_base 161: mod_base = OTHER; note = 2'O-methyl adenosine phosphorothioate
  modified_base 162: mod_base = OTHER; note = 2'O-methyl uridine
tccaggccgtgcataaggctgtggttgtagctcccgaaacgttgctacaataaggccgtctgaaaagatgtgccgcaacgctctgccccttaaagcttctgctttaaggggcatcgttagcagcttcagtccctttctcgtcgatggtcagcacagccttat

SEQ ID NO: 24639 - RNA, 165 nt, synthetic construct
  source 1..165: mol_type = other RNA
  modified_base 1: mod_base = OTHER; note = 2'O-methyl uridine phosphorothioate
  modified_base 2: mod_base = OTHER; note = 2'O-methyl cytidine phosphorothioate
  modified_base 3: mod_base = OTHER; note = 2'O-methyl cytidine phosphorothioate
  modified_base 162: mod_base = OTHER; note = guanosine phosphorothioate
  modified_base 163: mod_base = OTHER; note = 2'O-methyl cytidine phosphorothioate
  modified_base 164: mod_base = OTHER; note = 2'O-methyl cytidine phosphorothioate
  modified_base 165: mod_base = OTHER; note = 2'O-methyl uridine
tccaggccgtgcataaggctgtggttgtagctcccgaaacgttgctacaataaggccgtctgaaaagatgtgccgcaacgctctgccccttaaagcttctgctttaaggggcatcgttttcagtccctttctcgtcgatggtcagcacagccttatgcacggcct

SEQ ID NO: 24640 - RNA, 164 nt, synthetic construct
  source 1..164: mol_type = other RNA
  modified_base 1: mod_base = OTHER; note = 2'O-methyl uridine phosphorothioate
  modified_base 2: mod_base = OTHER; note = 2'O-methyl cytidine phosphorothioate
  modified_base 3: mod_base = OTHER; note = 2'O-methyl cytidine phosphorothioate
  modified_base 161: mod_base = OTHER; note = guanosine phosphorothioate
  modified_base 162: mod_base = OTHER; note = 2'O-methyl guanosine phosphorothioate
  modified_base 163: mod_base = OTHER; note = 2'O-methyl cytidine phosphorothioate
  modified_base 164: mod_base = OTHER; note = 2'O-methyl cytidine
tccaggccgtgcataaggctgtggttgtagctcccgaaacgttgctacaataaggccgtctgaaaagatgtgccgcaacgctctgccccttaaagcttctgctttaaggggcatcgttttcagtccctttctcgtcgatggtcagcacagccttatgcacggcc

SEQ ID NO: 24641 - RNA, 163 nt, synthetic construct
  source 1..163: mol_type = other RNA
  modified_base 1: mod_base = OTHER; note = 2'O-methyl uridine phosphorothioate
  modified_base 2: mod_base = OTHER; note = 2'O-methyl cytidine phosphorothioate
  modified_base 3: mod_base = OTHER; note = 2'O-methyl cytidine phosphorothioate
  modified_base 160: mod_base = OTHER; note = cytidine phosphorothioate
  modified_base 161: mod_base = OTHER; note = 2'O-methyl guanosine phosphorothioate
  modified_base 162: mod_base = OTHER; note = 2'O-methyl guanosine phosphorothioate
  modified_base 163: mod_base = OTHER; note = 2'O-methyl cytidine
tccaggccgtgcataaggctgtggttgtagctcccgaaacgttgctacaataaggccgtctgaaaagatgtgccgcaacgctctgccccttaaagcttctgctttaaggggcatcgttttcagtccctttctcgtcgatggtcagcacagccttatgcacggc

SEQ ID NO: 24642 - RNA, 162 nt, synthetic construct
  source 1..162: mol_type = other RNA
  modified_base 1: mod_base = OTHER; note = 2'O-methyl uridine phosphorothioate
  modified_base 2: mod_base = OTHER; note = 2'O-methyl cytidine phosphorothioate
  modified_base 3: mod_base = OTHER; note = 2'O-methyl cytidine phosphorothioate
  modified_base 159: mod_base = OTHER; note = adenosine phosphorothioate
  modified_base 160: mod_base = OTHER; note = 2'O-methyl cytidine phosphorothioate
  modified_base 161: mod_base = OTHER; note = 2'O-methyl guanosine phosphorothioate
  modified_base 162: mod_base = OTHER; note = 2'O-methyl guanosine
tccaggccgtgcataaggctgtggttgtagctcccgaaacgttgctacaataaggccgtctgaaaagatgtgccgcaacgctctgccccttaaagcttctgctttaaggggcatcgttttcagtccctttctcgtcgatggtcagcacagccttatgcacgg

SEQ ID NO: 24643 - RNA, 161 nt, synthetic construct
  source 1..161: mol_type = other RNA
  modified_base 1: mod_base = OTHER; note = 2'O-methyl uridine phosphorothioate
  modified_base 2: mod_base = OTHER; note = 2'O-methyl cytidine phosphorothioate
  modified_base 3: mod_base = OTHER; note = 2'O-methyl cytidine phosphorothioate
  modified_base 158: mod_base = OTHER; note = cytidine phosphorothioate
  modified_base 159: mod_base = OTHER; note = 2'O-methyl adenosine phosphorothioate
  modified_base 160: mod_base = OTHER; note = 2'O-methyl cytidine phosphorothioate
  modified_base 161: mod_base = OTHER; note = 2'O-methyl guanosine
tccaggccgtgcataaggctgtggttgtagctcccgaaacgttgctacaataaggccgtctgaaaagatgtgccgcaacgctctgccccttaaagcttctgctttaaggggcatcgttttcagtccctttctcgtcgatggtcagcacagccttatgcacg

SEQ ID NO: 24644 - RNA, 160 nt, synthetic construct
  source 1..160: mol_type = other RNA
  modified_base 1: mod_base = OTHER; note = 2'O-methyl uridine phosphorothioate
  modified_base 2: mod_base = OTHER; note = 2'O-methyl cytidine phosphorothioate
  modified_base 3: mod_base = OTHER; note = 2'O-methyl cytidine phosphorothioate
  modified_base 157: mod_base = OTHER; note = guanosine phosphorothioate
  modified_base 158: mod_base = OTHER; note = 2'O-methyl cytidine phosphorothioate
  modified_base 159: mod_base = OTHER; note = 2'O-methyl adenosine phosphorothioate
  modified_base 160: mod_base = OTHER; note = 2'O-methyl cytidine
tccaggccgtgcataaggctgtggttgtagctcccgaaacgttgctacaataaggccgtctgaaaagatgtgccgcaacgctctgccccttaaagcttctgctttaaggggcatcgttttcagtccctttctcgtcgatggtcagcacagccttatgcac

SEQ ID NO: 24645 - RNA, 159 nt, synthetic construct
  source 1..159: mol_type = other RNA
  modified_base 1: mod_base = OTHER; note = 2'O-methyl uridine phosphorothioate
  modified_base 2: mod_base = OTHER; note = 2'O-methyl cytidine phosphorothioate
  modified_base 3: mod_base = OTHER; note = 2'O-methyl cytidine phosphorothioate
  modified_base 156: mod_base = OTHER; note = uridine phosphorothioate
  modified_base 157: mod_base = OTHER; note = 2'O-methyl guanosine phosphorothioate
  modified_base 158: mod_base = OTHER; note = 2'O-methyl cytidine phosphorothioate
  modified_base 159: mod_base = OTHER; note = 2'O-methyl adenosine
tccaggccgtgcataaggctgtggttgtagctcccgaaacgttgctacaataaggccgtctgaaaagatgtgccgcaacgctctgccccttaaagcttctgctttaaggggcatcgttttcagtccctttctcgtcgatggtcagcacagccttatgca

SEQ ID NO: 24646 - RNA, 158 nt, synthetic construct
  source 1..158: mol_type = other RNA
  modified_base 1: mod_base = OTHER; note = 2'O-methyl uridine phosphorothioate
  modified_base 2: mod_base = OTHER; note = 2'O-methyl cytidine phosphorothioate
  modified_base 3: mod_base = OTHER; note = 2'O-methyl cytidine phosphorothioate
  modified_base 155: mod_base = OTHER; note = adenosine phosphorothioate
  modified_base 156: mod_base = OTHER; note = 2'O-methyl uridine phosphorothioate
  modified_base 157: mod_base = OTHER; note = 2'O-methyl guanosine phosphorothioate
  modified_base 158: mod_base = OTHER; note = 2'O-methyl cytidine
tccaggccgtgcataaggctgtggttgtagctcccgaaacgttgctacaataaggccgtctgaaaagatgtgccgcaacgctctgccccttaaagcttctgctttaaggggcatcgttttcagtccctttctcgtcgatggtcagcacagccttatgc

SEQ ID NO: 24647 - RNA, 157 nt, synthetic construct
  source 1..157: mol_type = other RNA
  modified_base 1: mod_base = OTHER; note = 2'O-methyl uridine phosphorothioate
  modified_base 2: mod_base = OTHER; note = 2'O-methyl cytidine phosphorothioate
  modified_base 3: mod_base = OTHER; note = 2'O-methyl cytidine phosphorothioate
  modified_base 154: mod_base = OTHER; note = uridine phosphorothioate
  modified_base 155: mod_base = OTHER; note = 2'O-methyl adenosine phosphorothioate
  modified_base 156: mod_base = OTHER; note = 2'O-methyl uridine phosphorothioate
  modified_base 157: mod_base = OTHER; note = 2'O-methyl guanosine
tccaggccgtgcataaggctgtggttgtagctcccgaaacgttgctacaataaggccgtctgaaaagatgtgccgcaacgctctgccccttaaagcttctgctttaaggggcatcgttttcagtccctttctcgtcgatggtcagcacagccttatg

SEQ ID NO: 24648 - RNA, 156 nt, synthetic construct
  source 1..156: mol_type = other RNA
  modified_base 1: mod_base = OTHER; note = 2'O-methyl uridine phosphorothioate
  modified_base 2: mod_base = OTHER; note = 2'O-methyl cytidine phosphorothioate
  modified_base 3: mod_base = OTHER; note = 2'O-methyl cytidine phosphorothioate
  modified_base 153: mod_base = OTHER; note = uridine phosphorothioate
  modified_base 154: mod_base = OTHER; note = 2'O-methyl uridine phosphorothioate
  modified_base 155: mod_base = OTHER; note = 2'O-methyl adenosine phosphorothioate
  modified_base 156: mod_base = OTHER; note = 2'O-methyl uridine
tccaggccgtgcataaggctgtggttgtagctcccgaaacgttgctacaataaggccgtctgaaaagatgtgccgcaacgctctgccccttaaagcttctgctttaaggggcatcgttttcagtccctttctcgtcgatggtcagcacagccttat

SEQ ID NO: 24649 - RNA, 162 nt, synthetic construct
  source 1..162: mol_type = other RNA
  modified_base 1: mod_base = OTHER; note = 2'O-methyl uridine phosphorothioate
  modified_base 2: mod_base = OTHER; note = 2'O-methyl cytidine phosphorothioate
  modified_base 3: mod_base = OTHER; note = 2'O-methyl cytidine phosphorothioate
  modified_base 159: mod_base = OTHER; note = guanosine phosphorothioate
  modified_base 160: mod_base = OTHER; note = 2'O-methyl cytidine phosphorothioate
  modified_base 161: mod_base = OTHER; note = 2'O-methyl cytidine phosphorothioate
  modified_base 162: mod_base = OTHER; note = 2'O-methyl uridine
tccaggccgtgcataaggctgtggttgtagctcccgaaacgttgctacaataaggccgtctgaaaagatgtgccgcaacgctctgccccttaaagcttctgctttaaggggcatcgttagtccctttctcgtcgatggtcagcacagccttatgcacggcct

SEQ ID NO: 24650 - RNA, 161 nt, synthetic construct
  source 1..161: mol_type = other RNA
  modified_base 1: mod_base = OTHER; note = 2'O-methyl uridine phosphorothioate
  modified_base 2: mod_base = OTHER; note = 2'O-methyl cytidine phosphorothioate
  modified_base 3: mod_base = OTHER; note = 2'O-methyl cytidine phosphorothioate
  modified_base 158: mod_base = OTHER; note = guanosine phosphorothioate
  modified_base 159: mod_base = OTHER; note = 2'O-methyl guanosine phosphorothioate
  modified_base 160: mod_base = OTHER; note = 2'O-methyl cytidine phosphorothioate
  modified_base 161: mod_base = OTHER; note = 2'O-methyl cytidine
tccaggccgtgcataaggctgtggttgtagctcccgaaacgttgctacaataaggccgtctgaaaagatgtgccgcaacgctctgccccttaaagcttctgctttaaggggcatcgttagtccctttctcgtcgatggtcagcacagccttatgcacggcc

SEQ ID NO: 24651 - RNA, 160 nt, synthetic construct
  source 1..160: mol_type = other RNA
  modified_base 1: mod_base = OTHER; note = 2'O-methyl uridine phosphorothioate
  modified_base 2: mod_base = OTHER; note = 2'O-methyl cytidine phosphorothioate
  modified_base 3: mod_base = OTHER; note = 2'O-methyl cytidine phosphorothioate
  modified_base 157: mod_base = OTHER; note = cytidine phosphorothioate
  modified_base 158: mod_base = OTHER; note = 2'O-methyl guanosine phosphorothioate
  modified_base 159: mod_base = OTHER; note = 2'O-methyl guanosine phosphorothioate
  modified_base 160: mod_base = OTHER; note = 2'O-methyl cytidine
tccaggccgtgcataaggctgtggttgtagctcccgaaacgttgctacaataaggccgtctgaaaagatgtgccgcaacgctctgccccttaaagcttctgctttaaggggcatcgttagtccctttctcgtcgatggtcagcacagccttatgcacggc

SEQ ID NO: 24652 - RNA, 159 nt, synthetic construct
  source 1..159: mol_type = other RNA
  modified_base 1: mod_base = OTHER; note = 2'O-methyl uridine phosphorothioate
  modified_base 2: mod_base = OTHER; note = 2'O-methyl cytidine phosphorothioate
  modified_base 3: mod_base = OTHER; note = 2'O-methyl cytidine phosphorothioate
  modified_base 156: mod_base = OTHER; note = adenosine phosphorothioate
  modified_base 157: mod_base = OTHER; note = 2'O-methyl cytidine phosphorothioate
  modified_base 158: mod_base = OTHER; note = 2'O-methyl guanosine phosphorothioate
  modified_base 159: mod_base = OTHER; note = 2'O-methyl guanosine
tccaggccgtgcataaggctgtggttgtagctcccgaaacgttgctacaataaggccgtctgaaaagatgtgccgcaacgctctgccccttaaagcttctgctttaaggggcatcgttagtccctttctcgtcgatggtcagcacagccttatgcacgg

SEQ ID NO: 24653 - RNA, 158 nt, synthetic construct
  source 1..158: mol_type = other RNA
  modified_base 1: mod_base = OTHER; note = 2'O-methyl uridine phosphorothioate
  modified_base 2: mod_base = OTHER; note = 2'O-methyl cytidine phosphorothioate
  modified_base 3: mod_base = OTHER; note = 2'O-methyl cytidine phosphorothioate
  modified_base 155: mod_base = OTHER; note = cytidine phosphorothioate
  modified_base 156: mod_base = OTHER; note = 2'O-methyl adenosine phosphorothioate
  modified_base 157: mod_base = OTHER; note = 2'O-methyl cytidine phosphorothioate
  modified_base 158: mod_base = OTHER; note = 2'O-methyl guanosine
tccaggccgtgcataaggctgtggttgtagctcccgaaacgttgctacaataaggccgtctgaaaagatgtgccgcaacgctctgccccttaaagcttctgctttaaggggcatcgttagtccctttctcgtcgatggtcagcacagccttatgcacg

SEQ ID NO: 24654 - RNA, 157 nt, synthetic construct
  source 1..157: mol_type = other RNA
  modified_base 1: mod_base = OTHER; note = 2'O-methyl uridine phosphorothioate
  modified_base 2: mod_base = OTHER; note = 2'O-methyl cytidine phosphorothioate
  modified_base 3: mod_base = OTHER; note = 2'O-methyl cytidine phosphorothioate
  modified_base 154: mod_base = OTHER; note = guanosine phosphorothioate
  modified_base 155: mod_base = OTHER; note = 2'O-methyl cytidine phosphorothioate
  modified_base 156: mod_base = OTHER; note = 2'O-methyl adenosine phosphorothioate
  modified_base 157: mod_base = OTHER; note = 2'O-methyl cytidine
tccaggccgtgcataaggctgtggttgtagctcccgaaacgttgctacaataaggccgtctgaaaagatgtgccgcaacgctctgccccttaaagcttctgctttaaggggcatcgttagtccctttctcgtcgatggtcagcacagccttatgcac

SEQ ID NO: 24655 - RNA, 156 nt, synthetic construct
  source 1..156: mol_type = other RNA
  modified_base 1: mod_base = OTHER; note = 2'O-methyl uridine phosphorothioate
  modified_base 2: mod_base = OTHER; note = 2'O-methyl cytidine phosphorothioate
  modified_base 3: mod_base = OTHER; note = 2'O-methyl cytidine phosphorothioate
  modified_base 153: mod_base = OTHER; note = uridine phosphorothioate
  modified_base 154: mod_base = OTHER; note = 2'O-methyl guanosine phosphorothioate
  modified_base 155: mod_base = OTHER; note = 2'O-methyl cytidine phosphorothioate
  modified_base 156: mod_base = OTHER; note = 2'O-methyl adenosine
tccaggccgtgcataaggctgtggttgtagctcccgaaacgttgctacaataaggccgtctgaaaagatgtgccgcaacgctctgccccttaaagcttctgctttaaggggcatcgttagtccctttctcgtcgatggtcagcacagccttatgca

SEQ ID NO: 24656 - RNA, 155 nt, synthetic construct
  source 1..155: mol_type = other RNA
  modified_base 1: mod_base = OTHER; note = 2'O-methyl uridine phosphorothioate
  modified_base 2: mod_base = OTHER; note = 2'O-methyl cytidine phosphorothioate
  modified_base 3: mod_base = OTHER; note = 2'O-methyl cytidine phosphorothioate
  modified_base 152: mod_base = OTHER; note = adenosine phosphorothioate
  modified_base 153: mod_base = OTHER; note = 2'O-methyl uridine phosphorothioate
  modified_base 154: mod_base = OTHER; note = 2'O-methyl guanosine phosphorothioate
  modified_base 155: mod_base = OTHER; note = 2'O-methyl cytidine
tccaggccgtgcataaggctgtggttgtagctcccgaaacgttgctacaataaggccgtctgaaaagatgtgccgcaacgctctgccccttaaagcttctgctttaaggggcatcgttagtccctttctcgtcgatggtcagcacagccttatgc

SEQ ID NO: 24657 - RNA, 154 nt, synthetic construct
  source 1..154: mol_type = other RNA
  modified_base 1: mod_base = OTHER; note = 2'O-methyl uridine phosphorothioate
  modified_base 2: mod_base = OTHER; note = 2'O-methyl cytidine phosphorothioate
  modified_base 3: mod_base = OTHER; note = 2'O-methyl cytidine phosphorothioate
  modified_base 151: mod_base = OTHER; note = uridine phosphorothioate
  modified_base 152: mod_base = OTHER; note = 2'O-methyl adenosine phosphorothioate
  modified_base 153: mod_base = OTHER; note = 2'O-methyl uridine phosphorothioate
  modified_base 154: mod_base = OTHER; note = 2'O-methyl guanosine
tccaggccgtgcataaggctgtggttgtagctcccgaaacgttgctacaataaggccgtctgaaaagatgtgccgcaacgctctgccccttaaagcttctgctttaaggggcatcgttagtccctttctcgtcgatggtcagcacagccttatg

SEQ ID NO: 24658 - RNA, 153 nt, synthetic construct
  source 1..153: mol_type = other RNA
  modified_base 1: mod_base = OTHER; note = 2'O-methyl uridine phosphorothioate
  modified_base 2: mod_base = OTHER; note = 2'O-methyl cytidine phosphorothioate
  modified_base 3: mod_base = OTHER; note = 2'O-methyl cytidine phosphorothioate
  modified_base 150: mod_base = OTHER; note = uridine phosphorothioate
  modified_base 151: mod_base = OTHER; note = 2'O-methyl uridine phosphorothioate
  modified_base 152: mod_base = OTHER; note = 2'O-methyl adenosine phosphorothioate
  modified_base 153: mod_base = OTHER; note = 2'O-methyl uridine
tccaggccgtgcataaggctgtggttgtagctcccgaaacgttgctacaataaggccgtctgaaaagatgtgccgcaacgctctgccccttaaagcttctgctttaaggggcatcgttagtccctttctcgtcgatggtcagcacagccttat

SEQ ID NO: 24659 - RNA, 160 nt, synthetic construct
  source 1..160: mol_type = other RNA
  modified_base 1: mod_base = OTHER; note = 2'O-methyl uridine phosphorothioate
  modified_base 2: mod_base = OTHER; note = 2'O-methyl cytidine phosphorothioate
  modified_base 3: mod_base = OTHER; note = 2'O-methyl cytidine phosphorothioate
  modified_base 157: mod_base = OTHER; note = guanosine phosphorothioate
  modified_base 158: mod_base = OTHER; note = 2'O-methyl cytidine phosphorothioate
  modified_base 159: mod_base = OTHER; note = 2'O-methyl cytidine phosphorothioate
  modified_base 160: mod_base = OTHER; note = 2'O-methyl uridine
tccaggccgtgcataaggctgtggttgtagctcccgaaacgttgctacaataaggccgtctgaaaagatgtgccgcaacgctctgccccttaaagcttctgctttaaggggcatcgtttccctttctcgtcgatggtcagcacagccttatgcacggcct

SEQ ID NO: 24660 - RNA, 159 nt, synthetic construct
  source 1..159: mol_type = other RNA
  modified_base 1: mod_base = OTHER; note = 2'O-methyl uridine phosphorothioate
  modified_base 2: mod_base = OTHER; note = 2'O-methyl cytidine phosphorothioate
  modified_base 3: mod_base = OTHER; note = 2'O-methyl cytidine phosphorothioate
  modified_base 156: mod_base = OTHER; note = guanosine phosphorothioate
  modified_base 157: mod_base = OTHER; note = 2'O-methyl guanosine phosphorothioate
  modified_base 158: mod_base = OTHER; note = 2'O-methyl cytidine phosphorothioate
  modified_base 159: mod_base = OTHER; note = 2'O-methyl cytidine
tccaggccgtgcataaggctgtggttgtagctcccgaaacgttgctacaataaggccgtctgaaaagatgtgccgcaacgctctgccccttaaagcttctgctttaaggggcatcgtttccctttctcgtcgatggtcagcacagccttatgcacggcc

SEQ ID NO: 24661 - RNA, 158 nt, synthetic construct
  source 1..158: mol_type = other RNA
  modified_base 1: mod_base = OTHER; note = 2'O-methyl uridine phosphorothioate
  modified_base 2: mod_base = OTHER; note = 2'O-methyl cytidine phosphorothioate
  modified_base 3: mod_base = OTHER; note = 2'O-methyl cytidine phosphorothioate
  modified_base 155: mod_base = OTHER; note = cytidine phosphorothioate
  modified_base 156: mod_base = OTHER; note = 2'O-methyl guanosine phosphorothioate
  modified_base 157: mod_base = OTHER; note = 2'O-methyl guanosine phosphorothioate
  modified_base 158: mod_base = OTHER; note = 2'O-methyl cytidine
tccaggccgtgcataaggctgtggttgtagctcccgaaacgttgctacaataaggccgtctgaaaagatgtgccgcaacgctctgccccttaaagcttctgctttaaggggcatcgtttccctttctcgtcgatggtcagcacagccttatgcacggc

SEQ ID NO: 24662 - RNA, 157 nt, synthetic construct
  source 1..157: mol_type = other RNA
  modified_base 1: mod_base = OTHER; note = 2'O-methyl uridine phosphorothioate
  modified_base 2: mod_base = OTHER; note = 2'O-methyl cytidine phosphorothioate
  modified_base 3: mod_base = OTHER; note = 2'O-methyl cytidine phosphorothioate
  modified_base 154: mod_base = OTHER; note = adenosine phosphorothioate
  modified_base 155: mod_base = OTHER; note = 2'O-methyl cytidine phosphorothioate
  modified_base 156: mod_base = OTHER; note = 2'O-methyl guanosine phosphorothioate
  modified_base 157: mod_base = OTHER; note = 2'O-methyl guanosine
tccaggccgtgcataaggctgtggttgtagctcccgaaacgttgctacaataaggccgtctgaaaagatgtgccgcaacgctctgccccttaaagcttctgctttaaggggcatcgtttccctttctcgtcgatggtcagcacagccttatgcacgg

SEQ ID NO: 24663 - RNA, 156 nt, synthetic construct
  source 1..156: mol_type = other RNA
  modified_base 1: mod_base = OTHER; note = 2'O-methyl uridine phosphorothioate
  modified_base 2: mod_base = OTHER; note = 2'O-methyl cytidine phosphorothioate
  modified_base 3: mod_base = OTHER; note = 2'O-methyl cytidine phosphorothioate
  modified_base 153: mod_base = OTHER; note = cytidine phosphorothioate
  modified_base 154: mod_base = OTHER; note = 2'O-methyl adenosine phosphorothioate
  modified_base 155: mod_base = OTHER; note = 2'O-methyl cytidine phosphorothioate
  modified_base 156: mod_base = OTHER; note = 2'O-methyl guanosine
tccaggccgtgcataaggctgtggttgtagctcccgaaacgttgctacaataaggccgtctgaaaagatgtgccgcaacgctctgccccttaaagcttctgctttaaggggcatcgtttccctttctcgtcgatggtcagcacagccttatgcacg

SEQ ID NO: 24664 - RNA, 155 nt, synthetic construct
  source 1..155: mol_type = other RNA
  modified_base 1: mod_base = OTHER; note = 2'O-methyl uridine phosphorothioate
  modified_base 2: mod_base = OTHER; note = 2'O-methyl cytidine phosphorothioate
  modified_base 3: mod_base = OTHER; note = 2'O-methyl cytidine phosphorothioate
  modified_base 152: mod_base = OTHER; note = guanosine phosphorothioate
  modified_base 153: mod_base = OTHER; note = 2'O-methyl cytidine phosphorothioate
  modified_base 154: mod_base = OTHER; note = 2'O-methyl adenosine phosphorothioate
  modified_base 155: mod_base = OTHER; note = 2'O-methyl cytidine
tccaggccgtgcataaggctgtggttgtagctcccgaaacgttgctacaataaggccgtctgaaaagatgtgccgcaacgctctgccccttaaagcttctgctttaaggggcatcgtttccctttctcgtcgatggtcagcacagccttatgcac

SEQ ID NO: 24665 - RNA, 154 nt, synthetic construct
  source 1..154: mol_type = other RNA
  modified_base 1: mod_base = OTHER; note = 2'O-methyl uridine phosphorothioate
  modified_base 2: mod_base = OTHER; note = 2'O-methyl cytidine phosphorothioate
  modified_base 3: mod_base = OTHER; note = 2'O-methyl cytidine phosphorothioate
  modified_base 151: mod_base = OTHER; note = uridine phosphorothioate
  modified_base 152: mod_base = OTHER; note = 2'O-methyl guanosine phosphorothioate
  modified_base 153: mod_base = OTHER; note = 2'O-methyl cytidine phosphorothioate
  modified_base 154: mod_base = OTHER; note = 2'O-methyl adenosine
tccaggccgtgcataaggctgtggttgtagctcccgaaacgttgctacaataaggccgtctgaaaagatgtgccgcaacgctctgccccttaaagcttctgctttaaggggcatcgtttccctttctcgtcgatggtcagcacagccttatgca

SEQ ID NO: 24666 - RNA, 153 nt, synthetic construct
  source 1..153: mol_type = other RNA
  modified_base 1: mod_base = OTHER; note = 2'O-methyl uridine phosphorothioate
  modified_base 2: mod_base = OTHER; note = 2'O-methyl cytidine phosphorothioate
  modified_base 3: mod_base = OTHER; note = 2'O-methyl cytidine phosphorothioate
  modified_base 150: mod_base = OTHER; note = adenosine phosphorothioate
  modified_base 151: mod_base = OTHER; note = 2'O-methyl uridine phosphorothioate
  modified_base 152: mod_base = OTHER; note = 2'O-methyl guanosine phosphorothioate
  modified_base 153: mod_base = OTHER; note = 2'O-methyl cytidine
tccaggccgtgcataaggctgtggttgtagctcccgaaacgttgctacaataaggccgtctgaaaagatgtgccgcaacgctctgccccttaaagcttctgctttaaggggcatcgtttccctttctcgtcgatggtcagcacagccttatgc

SEQ ID NO: 24667 - RNA, 152 nt, synthetic construct
  source 1..152: mol_type = other RNA
  modified_base 1: mod_base = OTHER; note = 2'O-methyl uridine phosphorothioate
  modified_base 2: mod_base = OTHER; note = 2'O-methyl cytidine phosphorothioate
  modified_base 3: mod_base = OTHER; note = 2'O-methyl cytidine phosphorothioate
  modified_base 149: mod_base = OTHER; note = uridine phosphorothioate
  modified_base 150: mod_base = OTHER; note = 2'O-methyl adenosine phosphorothioate
  modified_base 151: mod_base = OTHER; note = 2'O-methyl uridine phosphorothioate
  modified_base 152: mod_base = OTHER; note = 2'O-methyl guanosine
tccaggccgtgcataaggctgtggttgtagctcccgaaacgttgctacaataaggccgtctgaaaagatgtgccgcaacgctctgccccttaaagcttctgctttaaggggcatcgtttccctttctcgtcgatggtcagcacagccttatg

SEQ ID NO: 24668 - RNA, 151 nt, synthetic construct
  source 1..151: mol_type = other RNA
  modified_base 1: mod_base = OTHER; note = 2'O-methyl uridine phosphorothioate
  modified_base 2: mod_base = OTHER; note = 2'O-methyl cytidine phosphorothioate
  modified_base 3: mod_base = OTHER; note = 2'O-methyl cytidine phosphorothioate
  modified_base 148: mod_base = OTHER; note = uridine phosphorothioate
  modified_base 149: mod_base = OTHER; note = 2'O-methyl uridine phosphorothioate
  modified_base 150: mod_base = OTHER; note = 2'O-methyl adenosine phosphorothioate
  modified_base 151: mod_base = OTHER; note = 2'O-methyl uridine
tccaggccgtgcataaggctgtggttgtagctcccgaaacgttgctacaataaggccgtctgaaaagatgtgccgcaacgctctgccccttaaagcttctgctttaaggggcatcgtttccctttctcgtcgatggtcagcacagccttat

SEQ ID NO: 24669 - RNA, 158 nt, synthetic construct
  source 1..158: mol_type = other RNA
  modified_base 1: mod_base = OTHER; note = 2'O-methyl uridine phosphorothioate
  modified_base 2: mod_base = OTHER; note = 2'O-methyl cytidine phosphorothioate
  modified_base 3: mod_base = OTHER; note = 2'O-methyl cytidine phosphorothioate
  modified_base 155: mod_base = OTHER; note = guanosine phosphorothioate
  modified_base 156: mod_base = OTHER; note = 2'O-methyl cytidine phosphorothioate
  modified_base 157: mod_base = OTHER; note = 2'O-methyl cytidine phosphorothioate
  modified_base 158: mod_base = OTHER; note = 2'O-methyl uridine
tccaggccgtgcataaggctgtggttgtagctcccgaaacgttgctacaataaggccgtctgaaaagatgtgccgcaacgctctgccccttaaagcttctgctttaaggggcatcgttcctttctcgtcgatggtcagcacagccttatgcacggcct

SEQ ID NO: 24670 - RNA, 157 nt, synthetic construct
  source 1..157: mol_type = other RNA
  modified_base 1: mod_base = OTHER; note = 2'O-methyl uridine phosphorothioate
  modified_base 2: mod_base = OTHER; note = 2'O-methyl cytidine phosphorothioate
  modified_base 3: mod_base = OTHER; note = 2'O-methyl cytidine phosphorothioate
  modified_base 154: mod_base = OTHER; note = guanosine phosphorothioate
  modified_base 155: mod_base = OTHER; note = 2'O-methyl guanosine phosphorothioate
  modified_base 156: mod_base = OTHER; note = 2'O-methyl cytidine phosphorothioate
  modified_base 157: mod_base = OTHER; note = 2'O-methyl cytidine
tccaggccgtgcataaggctgtggttgtagctcccgaaacgttgctacaataaggccgtctgaaaagatgtgccgcaacgctctgccccttaaagcttctgctttaaggggcatcgttcctttctcgtcgatggtcagcacagccttatgcacggcc

SEQ ID NO: 24671 - RNA, 156 nt, synthetic construct
  source 1..156: mol_type = other RNA
  modified_base 1: mod_base = OTHER; note = 2'O-methyl uridine phosphorothioate
  modified_base 2: mod_base = OTHER; note = 2'O-methyl cytidine phosphorothioate
  modified_base 3: mod_base = OTHER; note = 2'O-methyl cytidine phosphorothioate
  modified_base 153: mod_base = OTHER; note = cytidine phosphorothioate
  modified_base 154: mod_base = OTHER; note = 2'O-methyl guanosine phosphorothioate
  modified_base 155: mod_base = OTHER; note = 2'O-methyl guanosine phosphorothioate
  modified_base 156: mod_base = OTHER; note = 2'O-methyl cytidine
tccaggccgtgcataaggctgtggttgtagctcccgaaacgttgctacaataaggccgtctgaaaagatgtgccgcaacgctctgccccttaaagcttctgctttaaggggcatcgttcctttctcgtcgatggtcagcacagccttatgcacggc

SEQ ID NO: 24672 - RNA, 155 nt, synthetic construct
  source 1..155: mol_type = other RNA
  modified_base 1: mod_base = OTHER; note = 2'O-methyl uridine phosphorothioate
  modified_base 2: mod_base = OTHER; note = 2'O-methyl cytidine phosphorothioate
  modified_base 3: mod_base = OTHER; note = 2'O-methyl cytidine phosphorothioate
  modified_base 152: mod_base = OTHER; note = adenosine phosphorothioate
  modified_base 153: mod_base = OTHER; note = 2'O-methyl cytidine phosphorothioate
  modified_base 154: mod_base = OTHER; note = 2'O-methyl guanosine phosphorothioate
  modified_base 155: mod_base = OTHER; note = 2'O-methyl guanosine
tccaggccgtgcataaggctgtggttgtagctcccgaaacgttgctacaataaggccgtctgaaaagatgtgccgcaacgctctgccccttaaagcttctgctttaaggggcatcgttcctttctcgtcgatggtcagcacagccttatgcacgg

SEQ ID NO: 24673 - RNA, 154 nt, synthetic construct
  source 1..154: mol_type = other RNA
  modified_base 1: mod_base = OTHER; note = 2'O-methyl uridine phosphorothioate
  modified_base 2: mod_base = OTHER; note = 2'O-methyl cytidine phosphorothioate
  modified_base 3: mod_base = OTHER; note = 2'O-methyl cytidine phosphorothioate
  modified_base 151: mod_base = OTHER; note = cytidine phosphorothioate
  modified_base 152: mod_base = OTHER; note = 2'O-methyl adenosine phosphorothioate
  modified_base 153: mod_base = OTHER; note = 2'O-methyl cytidine phosphorothioate
  modified_base 154: mod_base = OTHER; note = 2'O-methyl guanosine
tccaggccgtgcataaggctgtggttgtagctcccgaaacgttgctacaataaggccgtctgaaaagatgtgccgcaacgctctgccccttaaagcttctgctttaaggggcatcgttcctttctcgtcgatggtcagcacagccttatgcacg

SEQ ID NO: 24674 - RNA, 153 nt, synthetic construct
  source 1..153: mol_type = other RNA
  modified_base 1: mod_base = OTHER; note = 2'O-methyl uridine phosphorothioate
  modified_base 2: mod_base = OTHER; note = 2'O-methyl cytidine phosphorothioate
  modified_base 3: mod_base = OTHER; note = 2'O-methyl cytidine phosphorothioate
  modified_base 150: mod_base = OTHER; note = guanosine phosphorothioate
  modified_base 151: mod_base = OTHER; note = 2'O-methyl cytidine phosphorothioate
  modified_base 152: mod_base = OTHER; note = 2'O-methyl adenosine phosphorothioate
  modified_base 153: mod_base = OTHER; note = 2'O-methyl cytidine
tccaggccgtgcataaggctgtggttgtagctcccgaaacgttgctacaataaggccgtctgaaaagatgtgccgcaacgctctgccccttaaagcttctgctttaaggggcatcgttcctttctcgtcgatggtcagcacagccttatgcac

SEQ ID NO: 24675 - RNA, 152 nt, synthetic construct
  source 1..152: mol_type = other RNA
  modified_base 1: mod_base = OTHER; note = 2'O-methyl uridine phosphorothioate
  modified_base 2: mod_base = OTHER; note = 2'O-methyl cytidine phosphorothioate
  modified_base 3: mod_base = OTHER; note = 2'O-methyl cytidine phosphorothioate
  modified_base 149: mod_base = OTHER; note = uridine phosphorothioate
  modified_base 150: mod_base = OTHER; note = 2'O-methyl guanosine phosphorothioate
  modified_base 151: mod_base = OTHER; note = 2'O-methyl cytidine phosphorothioate
  modified_base 152: mod_base = OTHER; note = 2'O-methyl adenosine
tccaggccgtgcataaggctgtggttgtagctcccgaaacgttgctacaataaggccgtctgaaaagatgtgccgcaacgctctgccccttaaagcttctgctttaaggggcatcgttcctttctcgtcgatggtcagcacagccttatgca

SEQ ID NO: 24676 - RNA, 151 nt, synthetic construct
  source 1..151: mol_type = other RNA
  modified_base 1: mod_base = OTHER; note = 2'O-methyl uridine phosphorothioate
  modified_base 2: mod_base = OTHER; note = 2'O-methyl cytidine phosphorothioate
  modified_base 3: mod_base = OTHER; note = 2'O-methyl cytidine phosphorothioate
  modified_base 148: mod_base = OTHER; note = adenosine phosphorothioate
  modified_base 149: mod_base = OTHER; note = 2'O-methyl uridine phosphorothioate
  modified_base 150: mod_base = OTHER; note = 2'O-methyl guanosine phosphorothioate
  modified_base 151: mod_base = OTHER; note = 2'O-methyl cytidine
tccaggccgtgcataaggctgtggttgtagctcccgaaacgttgctacaataaggccgtctgaaaagatgtgccgcaacgctctgccccttaaagcttctgctttaaggggcatcgttcctttctcgtcgatggtcagcacagccttatgc

SEQ ID NO: 24677 - RNA, 150 nt, synthetic construct
  source 1..150: mol_type = other RNA
  modified_base 1: mod_base = OTHER; note = 2'O-methyl uridine phosphorothioate
  modified_base 2: mod_base = OTHER; note = 2'O-methyl cytidine phosphorothioate
  modified_base 3: mod_base = OTHER; note = 2'O-methyl cytidine phosphorothioate
  modified_base 147: mod_base = OTHER; note = uridine phosphorothioate
  modified_base 148: mod_base = OTHER; note = 2'O-methyl adenosine phosphorothioate
  modified_base 149: mod_base = OTHER; note = 2'O-methyl uridine phosphorothioate
  modified_base 150: mod_base = OTHER; note = 2'O-methyl guanosine
tccaggccgtgcataaggctgtggttgtagctcccgaaacgttgctacaataaggccgtctgaaaagatgtgccgcaacgctctgccccttaaagcttctgctttaaggggcatcgttcctttctcgtcgatggtcagcacagccttatg

SEQ ID NO: 24678 - RNA, 149 nt, synthetic construct
  source 1..149: mol_type = other RNA
  modified_base 1: mod_base = OTHER; note = 2'O-methyl uridine phosphorothioate
  modified_base 2: mod_base = OTHER; note = 2'O-methyl cytidine phosphorothioate
  modified_base 3: mod_base = OTHER; note = 2'O-methyl cytidine phosphorothioate
  modified_base 146: mod_base = OTHER; note = uridine phosphorothioate
  modified_base 147: mod_base = OTHER; note = 2'O-methyl uridine phosphorothioate
  modified_base 148: mod_base = OTHER; note = 2'O-methyl adenosine phosphorothioate
  modified_base 149: mod_base = OTHER; note = 2'O-methyl uridine
tccaggccgtgcataaggctgtggttgtagctcccgaaacgttgctacaataaggccgtctgaaaagatgtgccgcaacgctctgccccttaaagcttctgctttaaggggcatcgttcctttctcgtcgatggtcagcacagccttat

SEQ ID NO: 24679 - RNA, 156 nt, synthetic construct
  source 1..156: mol_type = other RNA
  modified_base 1: mod_base = OTHER; note = 2'O-methyl uridine phosphorothioate
  modified_base 2: mod_base = OTHER; note = 2'O-methyl cytidine phosphorothioate
  modified_base 3: mod_base = OTHER; note = 2'O-methyl cytidine phosphorothioate
  modified_base 153: mod_base = OTHER; note = guanosine phosphorothioate
  modified_base 154: mod_base = OTHER; note = 2'O-methyl cytidine phosphorothioate
  modified_base 155: mod_base = OTHER; note = 2'O-methyl cytidine phosphorothioate
  modified_base 156: mod_base = OTHER; note = 2'O-methyl uridine
tccaggccgtgcataaggctgtggttgtagctcccgaaacgttgctacaataaggccgtctgaaaagatgtgccgcaacgctctgccccttaaagcttctgctttaaggggcatcgtttttctcgtcgatggtcagcacagccttatgcacggcct

SEQ ID NO: 24680 - RNA, 155 nt, synthetic construct
  source 1..155: mol_type = other RNA
  modified_base 1: mod_base = OTHER; note = 2'O-methyl uridine phosphorothioate
  modified_base 2: mod_base = OTHER; note = 2'O-methyl cytidine phosphorothioate
  modified_base 3: mod_base = OTHER; note = 2'O-methyl cytidine phosphorothioate
  modified_base 152: mod_base = OTHER; note = guanosine phosphorothioate
  modified_base 153: mod_base = OTHER; note = 2'O-methyl guanosine phosphorothioate
  modified_base 154: mod_base = OTHER; note = 2'O-methyl cytidine phosphorothioate
  modified_base 155: mod_base = OTHER; note = 2'O-methyl cytidine
tccaggccgtgcataaggctgtggttgtagctcccgaaacgttgctacaataaggccgtctgaaaagatgtgccgcaacgctctgccccttaaagcttctgctttaaggggcatcgtttttctcgtcgatggtcagcacagccttatgcacggcc

SEQ ID NO: 24681 - RNA, 154 nt, synthetic construct
  source 1..154: mol_type = other RNA
  modified_base 1: mod_base = OTHER; note = 2'O-methyl uridine phosphorothioate
  modified_base 2: mod_base = OTHER; note = 2'O-methyl cytidine phosphorothioate
  modified_base 3: mod_base = OTHER; note = 2'O-methyl cytidine phosphorothioate
  modified_base 151: mod_base = OTHER; note = cytidine phosphorothioate
  modified_base 152: mod_base = OTHER; note = 2'O-methyl guanosine phosphorothioate
  modified_base 153: mod_base = OTHER; note = 2'O-methyl guanosine phosphorothioate
  modified_base 154: mod_base = OTHER; note = 2'O-methyl cytidine
tccaggccgtgcataaggctgtggttgtagctcccgaaacgttgctacaataaggccgtctgaaaagatgtgccgcaacgctctgccccttaaagcttctgctttaaggggcatcgtttttctcgtcgatggtcagcacagccttatgcacggc

SEQ ID NO: 24682 - RNA, 153 nt, synthetic construct
  source 1..153: mol_type = other RNA
  modified_base 1: mod_base = OTHER; note = 2'O-methyl uridine phosphorothioate
  modified_base 2: mod_base = OTHER; note = 2'O-methyl cytidine phosphorothioate
  modified_base 3: mod_base = OTHER; note = 2'O-methyl cytidine phosphorothioate
  modified_base 150: mod_base = OTHER; note = adenosine phosphorothioate
  modified_base 151: mod_base = OTHER; note = 2'O-methyl cytidine phosphorothioate
  modified_base 152: mod_base = OTHER; note = 2'O-methyl guanosine phosphorothioate
  modified_base 153: mod_base = OTHER; note = 2'O-methyl guanosine
tccaggccgtgcataaggctgtggttgtagctcccgaaacgttgctacaataaggccgtctgaaaagatgtgccgcaacgctctgccccttaaagcttctgctttaaggggcatcgtttttctcgtcgatggtcagcacagccttatgcacgg

SEQ ID NO: 24683 - RNA, 152 nt, synthetic construct
  source 1..152: mol_type = other RNA
  modified_base 1: mod_base = OTHER; note = 2'O-methyl uridine phosphorothioate
  modified_base 2: mod_base = OTHER; note = 2'O-methyl cytidine phosphorothioate
  modified_base 3: mod_base = OTHER; note = 2'O-methyl cytidine phosphorothioate
  modified_base 149: mod_base = OTHER; note = cytidine phosphorothioate
  modified_base 150: mod_base = OTHER; note = 2'O-methyl adenosine phosphorothioate
  modified_base 151: mod_base = OTHER; note = 2'O-methyl cytidine phosphorothioate
  modified_base 152: mod_base = OTHER; note = 2'O-methyl guanosine
tccaggccgtgcataaggctgtggttgtagctcccgaaacgttgctacaataaggccgtctgaaaagatgtgccgcaacgctctgccccttaaagcttctgctttaaggggcatcgtttttctcgtcgatggtcagcacagccttatgcacg

SEQ ID NO: 24684 - RNA, 151 nt, synthetic construct
  source 1..151: mol_type = other RNA
  modified_base 1: mod_base = OTHER; note = 2'O-methyl uridine phosphorothioate
  modified_base 2: mod_base = OTHER; note = 2'O-methyl cytidine phosphorothioate
  modified_base 3: mod_base = OTHER; note = 2'O-methyl cytidine phosphorothioate
  modified_base 148: mod_base = OTHER; note = guanosine phosphorothioate
  modified_base 149: mod_base = OTHER; note = 2'O-methyl cytidine phosphorothioate
  modified_base 150: mod_base = OTHER; note = 2'O-methyl adenosine phosphorothioate
  modified_base 151: mod_base = OTHER; note = 2'O-methyl cytidine
tccaggccgtgcataaggctgtggttgtagctcccgaaacgttgctacaataaggccgtctgaaaagatgtgccgcaacgctctgccccttaaagcttctgctttaaggggcatcgtttttctcgtcgatggtcagcacagccttatgcac

SEQ ID NO: 24685 - RNA, 150 nt, synthetic construct
  source 1..150: mol_type = other RNA
  modified_base 1: mod_base = OTHER; note = 2'O-methyl uridine phosphorothioate
  modified_base 2: mod_base = OTHER; note = 2'O-methyl cytidine phosphorothioate
  modified_base 3: mod_base = OTHER; note = 2'O-methyl cytidine phosphorothioate
  modified_base 147: mod_base = OTHER; note = uridine phosphorothioate
  modified_base 148: mod_base = OTHER; note = 2'O-methyl guanosine phosphorothioate
  modified_base 149: mod_base = OTHER; note = 2'O-methyl cytidine phosphorothioate
  modified_base 150: mod_base = OTHER; note = 2'O-methyl adenosine
tccaggccgtgcataaggctgtggttgtagctcccgaaacgttgctacaataaggccgtctgaaaagatgtgccgcaacgctctgccccttaaagcttctgctttaaggggcatcgtttttctcgtcgatggtcagcacagccttatgca

SEQ ID NO: 24686 - RNA, 149 nt, synthetic construct
  source 1..149: mol_type = other RNA
  modified_base 1: mod_base = OTHER; note = 2'O-methyl uridine phosphorothioate
  modified_base 2: mod_base = OTHER; note = 2'O-methyl cytidine phosphorothioate
  modified_base 3: mod_base = OTHER; note = 2'O-methyl cytidine phosphorothioate
  modified_base 146: mod_base = OTHER; note = adenosine phosphorothioate
  modified_base 147: mod_base = OTHER; note = 2'O-methyl uridine phosphorothioate
  modified_base 148: mod_base = OTHER; note = 2'O-methyl guanosine phosphorothioate
  modified_base 149: mod_base = OTHER; note = 2'O-methyl cytidine
tccaggccgtgcataaggctgtggttgtagctcccgaaacgttgctacaataaggccgtctgaaaagatgtgccgcaacgctctgccccttaaagcttctgctttaaggggcatcgtttttctcgtcgatggtcagcacagccttatgc

SEQ ID NO: 24687 - RNA, 148 nt, synthetic construct
  source 1..148: mol_type = other RNA
  modified_base 1: mod_base = OTHER; note = 2'O-methyl uridine phosphorothioate
  modified_base 2: mod_base = OTHER; note = 2'O-methyl cytidine phosphorothioate
  modified_base 3: mod_base = OTHER; note = 2'O-methyl cytidine phosphorothioate
  modified_base 145: mod_base = OTHER; note = uridine phosphorothioate
  modified_base 146: mod_base = OTHER; note = 2'O-methyl adenosine phosphorothioate
  modified_base 147: mod_base = OTHER; note = 2'O-methyl uridine phosphorothioate
  modified_base 148: mod_base = OTHER; note = 2'O-methyl guanosine
tccaggccgtgcataaggctgtggttgtagctcccgaaacgttgctacaataaggccgtctgaaaagatgtgccgcaacgctctgccccttaaagcttctgctttaaggggcatcgtttttctcgtcgatggtcagcacagccttatg

SEQ ID NO: 24688 - RNA, 147 nt, synthetic construct
  source 1..147: mol_type = other RNA
  modified_base 1: mod_base = OTHER; note = 2'O-methyl uridine phosphorothioate
  modified_base 2: mod_base = OTHER; note = 2'O-methyl cytidine phosphorothioate
  modified_base 3: mod_base = OTHER; note = 2'O-methyl cytidine phosphorothioate
  modified_base 144: mod_base = OTHER; note = uridine phosphorothioate
  modified_base 145: mod_base = OTHER; note = 2'O-methyl uridine phosphorothioate
  modified_base 146: mod_base = OTHER; note = 2'O-methyl adenosine phosphorothioate
  modified_base 147: mod_base = OTHER; note = 2'O-methyl uridine
tccaggccgtgcataaggctgtggttgtagctcccgaaacgttgctacaataaggccgtctgaaaagatgtgccgcaacgctctgccccttaaagcttctgctttaaggggcatcgtttttctcgtcgatggtcagcacagccttat

SEQ ID NO: 24689 - RNA, 154 nt, synthetic construct
  source 1..154: mol_type = other RNA
  modified_base 1: mod_base = OTHER; note = 2'O-methyl uridine phosphorothioate
  modified_base 2: mod_base = OTHER; note = 2'O-methyl cytidine phosphorothioate
  modified_base 3: mod_base = OTHER; note = 2'O-methyl cytidine phosphorothioate
  modified_base 151: mod_base = OTHER; note = guanosine phosphorothioate
  modified_base 152: mod_base = OTHER; note = 2'O-methyl cytidine phosphorothioate
  modified_base 153: mod_base = OTHER; note = 2'O-methyl cytidine phosphorothioate
  modified_base 154: mod_base = OTHER; note = 2'O-methyl uridine
tccaggccgtgcataaggctgtggttgtagctcccgaaacgttgctacaataaggccgtctgaaaagatgtgccgcaacgctctgccccttaaagcttctgctttaaggggcatcgtttctcgtcgatggtcagcacagccttatgcacggcct

SEQ ID NO: 24690 - RNA, 153 nt, synthetic construct
  source 1..153: mol_type = other RNA
  modified_base 1: mod_base = OTHER; note = 2'O-methyl uridine phosphorothioate
  modified_base 2: mod_base = OTHER; note = 2'O-methyl cytidine phosphorothioate
  modified_base 3: mod_base = OTHER; note = 2'O-methyl cytidine phosphorothioate
  modified_base 150: mod_base = OTHER; note = guanosine phosphorothioate
  modified_base 151: mod_base = OTHER; note = 2'O-methyl guanosine phosphorothioate
  modified_base 152: mod_base = OTHER; note = 2'O-methyl cytidine phosphorothioate
  modified_base 153: mod_base = OTHER; note = 2'O-methyl cytidine
tccaggccgtgcataaggctgtggttgtagctcccgaaacgttgctacaataaggccgtctgaaaagatgtgccgcaacgctctgccccttaaagcttctgctttaaggggcatcgtttctcgtcgatggtcagcacagccttatgcacggcc

SEQ ID NO: 24691 - RNA, 152 nt, synthetic construct
  source 1..152: mol_type = other RNA
  modified_base 1: mod_base = OTHER; note = 2'O-methyl uridine phosphorothioate
  modified_base 2: mod_base = OTHER; note = 2'O-methyl cytidine phosphorothioate
  modified_base 3: mod_base = OTHER; note = 2'O-methyl cytidine phosphorothioate
  modified_base 149: mod_base = OTHER; note = cytidine phosphorothioate
  modified_base 150: mod_base = OTHER; note = 2'O-methyl guanosine phosphorothioate
  modified_base 151: mod_base = OTHER; note = 2'O-methyl guanosine phosphorothioate
  modified_base 152: mod_base = OTHER; note = 2'O-methyl cytidine
tccaggccgtgcataaggctgtggttgtagctcccgaaacgttgctacaataaggccgtctgaaaagatgtgccgcaacgctctgccccttaaagcttctgctttaaggggcatcgtttctcgtcgatggtcagcacagccttatgcacggc

SEQ ID NO: 24692 - RNA, 151 nt, synthetic construct
  source 1..151: mol_type = other RNA
  modified_base 1: mod_base = OTHER; note = 2'O-methyl uridine phosphorothioate
  modified_base 2: mod_base = OTHER; note = 2'O-methyl cytidine phosphorothioate
  modified_base 3: mod_base = OTHER; note = 2'O-methyl cytidine phosphorothioate
  modified_base 148: mod_base = OTHER; note = adenosine phosphorothioate
  modified_base 149: mod_base = OTHER; note = 2'O-methyl cytidine phosphorothioate
  modified_base 150: mod_base = OTHER; note = 2'O-methyl guanosine phosphorothioate
  modified_base 151: mod_base = OTHER; note = 2'O-methyl guanosine
tccaggccgtgcataaggctgtggttgtagctcccgaaacgttgctacaataaggccgtctgaaaagatgtgccgcaacgctctgccccttaaagcttctgctttaaggggcatcgtttctcgtcgatggtcagcacagccttatgcacgg

SEQ ID NO: 24693 - RNA, 150 nt, synthetic construct
  source 1..150: mol_type = other RNA
  modified_base 1: mod_base = OTHER; note = 2'O-methyl uridine phosphorothioate
  modified_base 2: mod_base = OTHER; note = 2'O-methyl cytidine phosphorothioate
  modified_base 3: mod_base = OTHER; note = 2'O-methyl cytidine phosphorothioate
  modified_base 147: mod_base = OTHER; note = cytidine phosphorothioate
  modified_base 148: mod_base = OTHER; note = 2'O-methyl adenosine phosphorothioate
  modified_base 149: mod_base = OTHER; note = 2'O-methyl cytidine phosphorothioate
  modified_base 150: mod_base = OTHER; note = 2'O-methyl guanosine
tccaggccgtgcataaggctgtggttgtagctcccgaaacgttgctacaataaggccgtctgaaaagatgtgccgcaacgctctgccccttaaagcttctgctttaaggggcatcgtttctcgtcgatggtcagcacagccttatgcacg

SEQ ID NO: 24694 - RNA, 149 nt, synthetic construct
  source 1..149: mol_type = other RNA
  modified_base 1: mod_base = OTHER; note = 2'O-methyl uridine phosphorothioate
  modified_base 2: mod_base = OTHER; note = 2'O-methyl cytidine phosphorothioate
  modified_base 3: mod_base = OTHER; note = 2'O-methyl cytidine phosphorothioate
  modified_base 146: mod_base = OTHER; note = guanosine phosphorothioate
  modified_base 147: mod_base = OTHER; note = 2'O-methyl cytidine phosphorothioate
  modified_base 148: mod_base = OTHER; note = 2'O-methyl adenosine phosphorothioate
  modified_base 149: mod_base = OTHER; note = 2'O-methyl cytidine
tccaggccgtgcataaggctgtggttgtagctcccgaaacgttgctacaataaggccgtctgaaaagatgtgccgcaacgctctgccccttaaagcttctgctttaaggggcatcgtttctcgtcgatggtcagcacagccttatgcac

SEQ ID NO: 24695 - RNA, 148 nt, synthetic construct
  source 1..148: mol_type = other RNA
  modified_base 1: mod_base = OTHER; note = 2'O-methyl uridine phosphorothioate
  modified_base 2: mod_base = OTHER; note = 2'O-methyl cytidine phosphorothioate
  modified_base 3: mod_base = OTHER; note = 2'O-methyl cytidine phosphorothioate
  modified_base 145: mod_base = OTHER; note = uridine phosphorothioate
  modified_base 146: mod_base = OTHER; note = 2'O-methyl guanosine phosphorothioate
  modified_base 147: mod_base = OTHER; note = 2'O-methyl cytidine phosphorothioate
  modified_base 148: mod_base = OTHER; note = 2'O-methyl adenosine
tccaggccgtgcataaggctgtggttgtagctcccgaaacgttgctacaataaggccgtctgaaaagatgtgccgcaacgctctgccccttaaagcttctgctttaaggggcatcgtttctcgtcgatggtcagcacagccttatgca

SEQ ID NO: 24696 - RNA, 147 nt, synthetic construct
  source 1..147: mol_type = other RNA
  modified_base 1: mod_base = OTHER; note = 2'O-methyl uridine phosphorothioate
  modified_base 2: mod_base = OTHER; note = 2'O-methyl cytidine phosphorothioate
  modified_base 3: mod_base = OTHER; note = 2'O-methyl cytidine phosphorothioate
  modified_base 144: mod_base = OTHER; note = adenosine phosphorothioate
  modified_base 145: mod_base = OTHER; note = 2'O-methyl uridine phosphorothioate
  modified_base 146: mod_base = OTHER; note = 2'O-methyl guanosine phosphorothioate
  modified_base 147: mod_base = OTHER; note = 2'O-methyl cytidine
tccaggccgtgcataaggctgtggttgtagctcccgaaacgttgctacaataaggccgtctgaaaagatgtgccgcaacgctctgccccttaaagcttctgctttaaggggcatcgtttctcgtcgatggtcagcacagccttatgc

SEQ ID NO: 24697 - RNA, 146 nt, synthetic construct
  source 1..146: mol_type = other RNA
  modified_base 1: mod_base = OTHER; note = 2'O-methyl uridine phosphorothioate
  modified_base 2: mod_base = OTHER; note = 2'O-methyl cytidine phosphorothioate
  modified_base 3: mod_base = OTHER; note = 2'O-methyl cytidine phosphorothioate
  modified_base 143: mod_base = OTHER; note = uridine phosphorothioate
  modified_base 144: mod_base = OTHER; note = 2'O-methyl adenosine phosphorothioate
  modified_base 145: mod_base = OTHER; note = 2'O-methyl uridine phosphorothioate
  modified_base 146: mod_base = OTHER; note = 2'O-methyl guanosine
tccaggccgtgcataaggctgtggttgtagctcccgaaacgttgctacaataaggccgtctgaaaagatgtgccgcaacgctctgccccttaaagcttctgctttaaggggcatcgtttctcgtcgatggtcagcacagccttatg

SEQ ID NO: 24698 - RNA, 145 nt, synthetic construct
  source 1..145: mol_type = other RNA
  modified_base 1: mod_base = OTHER; note = 2'O-methyl uridine phosphorothioate
  modified_base 2: mod_base = OTHER; note = 2'O-methyl cytidine phosphorothioate
  modified_base 3: mod_base = OTHER; note = 2'O-methyl cytidine phosphorothioate
  modified_base 142: mod_base = OTHER; note = uridine phosphorothioate
  modified_base 143: mod_base = OTHER; note = 2'O-methyl uridine phosphorothioate
  modified_base 144: mod_base = OTHER; note = 2'O-methyl adenosine phosphorothioate
  modified_base 145: mod_base = OTHER; note = 2'O-methyl uridine
tccaggccgtgcataaggctgtggttgtagctcccgaaacgttgctacaataaggccgtctgaaaagatgtgccgcaacgctctgccccttaaagcttctgctttaaggggcatcgtttctcgtcgatggtcagcacagccttat

SEQ ID NO: 24699 - RNA, 161 nt, synthetic construct
  source 1..161: mol_type = other RNA
  modified_base 1: mod_base = OTHER; note = 2'O-methyl cytidine phosphorothioate
  modified_base 2: mod_base = OTHER; note = 2'O-methyl cytidine phosphorothioate
  modified_base 3: mod_base = OTHER; note = 2'O-methyl adenosine phosphorothioate
  modified_base 158: mod_base = OTHER; note = cytidine phosphorothioate
  modified_base 159: mod_base = OTHER; note = 2'O-methyl uridine phosphorothioate
  modified_base 160: mod_base = OTHER; note = 2'O-methyl guanosine phosphorothioate
  modified_base 161: mod_base = OTHER; note = 2'O-methyl guanosine
ccaggccgtgcataaggctggttttagagctagaaatagcaagttaaaataaggctagtccgttatcaacttgaaaaagtggcaccgagtcggtgcacatggccccagcagcttcagtccctttctcgtcgatggtcagcacagccttatgcacggcctgg

SEQ ID NO: 24700 - RNA, 160 nt, synthetic construct
  source 1..160: mol_type = other RNA
  modified_base 1: mod_base = OTHER; note = 2'O-methyl cytidine phosphorothioate
  modified_base 2: mod_base = OTHER; note = 2'O-methyl cytidine phosphorothioate
  modified_base 3: mod_base = OTHER; note = 2'O-methyl adenosine phosphorothioate
  modified_base 157: mod_base = OTHER; note = cytidine phosphorothioate
  modified_base 158: mod_base = OTHER; note = 2'O-methyl cytidine phosphorothioate
  modified_base 159: mod_base = OTHER; note = 2'O-methyl uridine phosphorothioate
  modified_base 160: mod_base = OTHER; note = 2'O-methyl guanosine
ccaggccgtgcataaggctggttttagagctagaaatagcaagttaaaataaggctagtccgttatcaacttgaaaaagtggcaccgagtcggtgcacatggccccagcagcttcagtccctttctcgtcgatggtcagcacagccttatgcacggcctg

SEQ ID NO: 24701 - RNA, 159 nt, synthetic construct
  source 1..159: mol_type = other RNA
  modified_base 1: mod_base = OTHER; note = 2'O-methyl cytidine phosphorothioate
  modified_base 2: mod_base = OTHER; note = 2'O-methyl cytidine phosphorothioate
  modified_base 3: mod_base = OTHER; note = 2'O-methyl adenosine phosphorothioate
  modified_base 156: mod_base = OTHER; note = guanosine phosphorothioate
  modified_base 157: mod_base = OTHER; note = 2'O-methyl cytidine phosphorothioate
  modified_base 158: mod_base = OTHER; note = 2'O-methyl cytidine phosphorothioate
  modified_base 159: mod_base = OTHER; note = 2'O-methyl uridine
ccaggccgtgcataaggctggttttagagctagaaatagcaagttaaaataaggctagtccgttatcaacttgaaaaagtggcaccgagtcggtgcacatggccccagcagcttcagtccctttctcgtcgatggtcagcacagccttatgcacggcct

SEQ ID NO: 24702 - RNA, 158 nt, synthetic construct
  source 1..158: mol_type = other RNA
  modified_base 1: mod_base = OTHER; note = 2'O-methyl cytidine phosphorothioate
  modified_base 2: mod_base = OTHER; note = 2'O-methyl cytidine phosphorothioate
  modified_base 3: mod_base = OTHER; note = 2'O-methyl adenosine phosphorothioate
  modified_base 155: mod_base = OTHER; note = guanosine phosphorothioate
  modified_base 156: mod_base = OTHER; note = 2'O-methyl guanosine phosphorothioate
  modified_base 157: mod_base = OTHER; note = 2'O-methyl cytidine phosphorothioate
  modified_base 158: mod_base = OTHER; note = 2'O-methyl cytidine
ccaggccgtgcataaggctggttttagagctagaaatagcaagttaaaataaggctagtccgttatcaacttgaaaaagtggcaccgagtcggtgcacatggccccagcagcttcagtccctttctcgtcgatggtcagcacagccttatgcacggcc

SEQ ID NO: 24703 - RNA, 157 nt, synthetic construct
  source 1..157: mol_type = other RNA
  modified_base 1: mod_base = OTHER; note = 2'O-methyl cytidine phosphorothioate
  modified_base 2: mod_base = OTHER; note = 2'O-methyl cytidine phosphorothioate
  modified_base 3: mod_base = OTHER; note = 2'O-methyl adenosine phosphorothioate
  modified_base 154: mod_base = OTHER; note = cytidine phosphorothioate
  modified_base 155: mod_base = OTHER; note = 2'O-methyl guanosine phosphorothioate
  modified_base 156: mod_base = OTHER; note = 2'O-methyl guanosine phosphorothioate
  modified_base 157: mod_base = OTHER; note = 2'O-methyl cytidine
ccaggccgtgcataaggctggttttagagctagaaatagcaagttaaaataaggctagtccgttatcaacttgaaaaagtggcaccgagtcggtgcacatggccccagcagcttcagtccctttctcgtcgatggtcagcacagccttatgcacggc

SEQ ID NO: 24704 - RNA, 156 nt, synthetic construct
  source 1..156: mol_type = other RNA
  modified_base 1: mod_base = OTHER; note = 2'O-methyl cytidine phosphorothioate
  modified_base 2: mod_base = OTHER; note = 2'O-methyl cytidine phosphorothioate
  modified_base 3: mod_base = OTHER; note = 2'O-methyl adenosine phosphorothioate
  modified_base 153: mod_base = OTHER; note = adenosine phosphorothioate
  modified_base 154: mod_base = OTHER; note = 2'O-methyl cytidine phosphorothioate
  modified_base 155: mod_base = OTHER; note = 2'O-methyl guanosine phosphorothioate
  modified_base 156: mod_base = OTHER; note = 2'O-methyl guanosine
ccaggccgtgcataaggctggttttagagctagaaatagcaagttaaaataaggctagtccgttatcaacttgaaaaagtggcaccgagtcggtgcacatggccccagcagcttcagtccctttctcgtcgatggtcagcacagccttatgcacgg

SEQ ID NO: 24705 - RNA, 155 nt, synthetic construct
  source 1..155: mol_type = other RNA
  modified_base 1: mod_base = OTHER; note = 2'O-methyl cytidine phosphorothioate
  modified_base 2: mod_base = OTHER; note = 2'O-methyl cytidine phosphorothioate
  modified_base 3: mod_base = OTHER; note = 2'O-methyl adenosine phosphorothioate
  modified_base 152: mod_base = OTHER; note = cytidine phosphorothioate
  modified_base 153: mod_base = OTHER; note = 2'O-methyl adenosine phosphorothioate
  modified_base 154: mod_base = OTHER; note = 2'O-methyl cytidine phosphorothioate
  modified_base 155: mod_base = OTHER; note = 2'O-methyl guanosine
ccaggccgtgcataaggctggttttagagctagaaatagcaagttaaaataaggctagtccgttatcaacttgaaaaagtggcaccgagtcggtgcacatggccccagcagcttcagtccctttctcgtcgatggtcagcacagccttatgcacg

SEQ ID NO: 24706 - RNA, 154 nt, synthetic construct
  source 1..154: mol_type = other RNA
  modified_base 1: mod_base = OTHER; note = 2'O-methyl cytidine phosphorothioate
  modified_base 2: mod_base = OTHER; note = 2'O-methyl cytidine phosphorothioate
  modified_base 3: mod_base = OTHER; note = 2'O-methyl adenosine phosphorothioate
  modified_base 151: mod_base = OTHER; note = guanosine phosphorothioate
  modified_base 152: mod_base = OTHER; note = 2'O-methyl cytidine phosphorothioate
  modified_base 153: mod_base = OTHER; note = 2'O-methyl adenosine phosphorothioate
  modified_base 154: mod_base = OTHER; note = 2'O-methyl cytidine
ccaggccgtgcataaggctggttttagagctagaaatagcaagttaaaataaggctagtccgttatcaacttgaaaaagtggcaccgagtcggtgcacatggccccagcagcttcagtccctttctcgtcgatggtcagcacagccttatgcac

SEQ ID NO: 24707 - RNA, 153 nt, synthetic construct
  source 1..153: mol_type = other RNA
  modified_base 1: mod_base = OTHER; note = 2'O-methyl cytidine phosphorothioate
  modified_base 2: mod_base = OTHER; note = 2'O-methyl cytidine phosphorothioate
  modified_base 3: mod_base = OTHER; note = 2'O-methyl adenosine phosphorothioate
  modified_base 150: mod_base = OTHER; note = uridine phosphorothioate
  modified_base 151: mod_base = OTHER; note = 2'O-methyl guanosine phosphorothioate
  modified_base 152: mod_base = OTHER; note = 2'O-methyl cytidine phosphorothioate
  modified_base 153: mod_base = OTHER; note = 2'O-methyl adenosine
ccaggccgtgcataaggctggttttagagctagaaatagcaagttaaaataaggctagtccgttatcaacttgaaaaagtggcaccgagtcggtgcacatggccccagcagcttcagtccctttctcgtcgatggtcagcacagccttatgca

SEQ ID NO: 24708 - RNA, 152 nt, synthetic construct
  source 1..152: mol_type = other RNA
  modified_base 1: mod_base = OTHER; note = 2'O-methyl cytidine phosphorothioate
  modified_base 2: mod_base = OTHER; note = 2'O-methyl cytidine phosphorothioate
  modified_base 3: mod_base = OTHER; note = 2'O-methyl adenosine phosphorothioate
  modified_base 149: mod_base = OTHER; note = adenosine phosphorothioate
  modified_base 150: mod_base = OTHER; note = 2'O-methyl uridine phosphorothioate
  modified_base 151: mod_base = OTHER; note = 2'O-methyl guanosine phosphorothioate
  modified_base 152: mod_base = OTHER; note = 2'O-methyl cytidine
ccaggccgtgcataaggctggttttagagctagaaatagcaagttaaaataaggctagtccgttatcaacttgaaaaagtggcaccgagtcggtgcacatggccccagcagcttcagtccctttctcgtcgatggtcagcacagccttatgc

SEQ ID NO: 24709 - RNA, 156 nt, synthetic construct
  source 1..156: mol_type = other RNA
  modified_base 1: mod_base = OTHER; note = 2'O-methyl cytidine phosphorothioate
  modified_base 2: mod_base = OTHER; note = 2'O-methyl cytidine phosphorothioate
  modified_base 3: mod_base = OTHER; note = 2'O-methyl adenosine phosphorothioate
  modified_base 153: mod_base = OTHER; note = cytidine phosphorothioate
  modified_base 154: mod_base = OTHER; note = 2'O-methyl uridine phosphorothioate
  modified_base 155: mod_base = OTHER; note = 2'O-methyl guanosine phosphorothioate
  modified_base 156: mod_base = OTHER; note = 2'O-methyl guanosine
ccaggccgtgcataaggctggttttagagctagaaatagcaagttaaaataaggctagtccgttatcaacttgaaaaagtggcaccgagtcggtgcgccccagcagcttcagtccctttctcgtcgatggtcagcacagccttatgcacggcctgg

SEQ ID NO: 24710 - RNA, 155 nt, synthetic construct
  source 1..155: mol_type = other RNA
  modified_base 1: mod_base = OTHER; note = 2'O-methyl cytidine phosphorothioate
  modified_base 2: mod_base = OTHER; note = 2'O-methyl cytidine phosphorothioate
  modified_base 3: mod_base = OTHER; note = 2'O-methyl adenosine phosphorothioate
  modified_base 152: mod_base = OTHER; note = cytidine phosphorothioate
  modified_base 153: mod_base = OTHER; note = 2'O-methyl cytidine phosphorothioate
  modified_base 154: mod_base = OTHER; note = 2'O-methyl uridine phosphorothioate
  modified_base 155: mod_base = OTHER; note = 2'O-methyl guanosine
ccaggccgtgcataaggctggttttagagctagaaatagcaagttaaaataaggctagtccgttatcaacttgaaaaagtggcaccgagtcggtgcgccccagcagcttcagtccctttctcgtcgatggtcagcacagccttatgcacggcctg

SEQ ID NO: 24711 - RNA, 154 nt, synthetic construct
  source 1..154: mol_type = other RNA
  modified_base 1: mod_base = OTHER; note = 2'O-methyl cytidine phosphorothioate
  modified_base 2: mod_base = OTHER; note = 2'O-methyl cytidine phosphorothioate
  modified_base 3: mod_base = OTHER; note = 2'O-methyl adenosine phosphorothioate
  modified_base 151: mod_base = OTHER; note = guanosine phosphorothioate
  modified_base 152: mod_base = OTHER; note = 2'O-methyl cytidine phosphorothioate
  modified_base 153: mod_base = OTHER; note = 2'O-methyl cytidine phosphorothioate
  modified_base 154: mod_base = OTHER; note = 2'O-methyl uridine
ccaggccgtgcataaggctggttttagagctagaaatagcaagttaaaataaggctagtccgttatcaacttgaaaaagtggcaccgagtcggtgcgccccagcagcttcagtccctttctcgtcgatggtcagcacagccttatgcacggcct

SEQ ID NO: 24712 - RNA, 153 nt, synthetic construct
  source 1..153: mol_type = other RNA
  modified_base 1: mod_base = OTHER; note = 2'O-methyl cytidine phosphorothioate
  modified_base 2: mod_base = OTHER; note = 2'O-methyl cytidine phosphorothioate
  modified_base 3: mod_base = OTHER; note = 2'O-methyl adenosine phosphorothioate
  modified_base 150: mod_base = OTHER; note = guanosine phosphorothioate
  modified_base 151: mod_base = OTHER; note = 2'O-methyl guanosine phosphorothioate
  modified_base 152: mod_base = OTHER; note = 2'O-methyl cytidine phosphorothioate
  modified_base 153: mod_base = OTHER; note = 2'O-methyl cytidine
ccaggccgtgcataaggctggttttagagctagaaatagcaagttaaaataaggctagtccgttatcaacttgaaaaagtggcaccgagtcggtgcgccccagcagcttcagtccctttctcgtcgatggtcagcacagccttatgcacggcc

SEQ ID NO: 24713 - RNA, 152 nt, synthetic construct
  source 1..152: mol_type = other RNA
  modified_base 1: mod_base = OTHER; note = 2'O-methyl cytidine phosphorothioate
  modified_base 2: mod_base = OTHER; note = 2'O-methyl cytidine phosphorothioate
  modified_base 3: mod_base = OTHER; note = 2'O-methyl adenosine phosphorothioate
  modified_base 149: mod_base = OTHER; note = cytidine phosphorothioate
  modified_base 150: mod_base = OTHER; note = 2'O-methyl guanosine phosphorothioate
  modified_base 151: mod_base = OTHER; note = 2'O-methyl guanosine phosphorothioate
  modified_base 152: mod_base = OTHER; note = 2'O-methyl cytidine
ccaggccgtgcataaggctggttttagagctagaaatagcaagttaaaataaggctagtccgttatcaacttgaaaaagtggcaccgagtcggtgcgccccagcagcttcagtccctttctcgtcgatggtcagcacagccttatgcacggc

SEQ ID NO: 24714 - RNA, 151 nt, synthetic construct
  source 1..151: mol_type = other RNA
  modified_base 1: mod_base = OTHER; note = 2'O-methyl cytidine phosphorothioate
  modified_base 2: mod_base = OTHER; note = 2'O-methyl cytidine phosphorothioate
  modified_base 3: mod_base = OTHER; note = 2'O-methyl adenosine phosphorothioate
  modified_base 148: mod_base = OTHER; note = adenosine phosphorothioate
  modified_base 149: mod_base = OTHER; note = 2'O-methyl cytidine phosphorothioate
  modified_base 150: mod_base = OTHER; note = 2'O-methyl guanosine phosphorothioate
  modified_base 151: mod_base = OTHER; note = 2'O-methyl guanosine
ccaggccgtgcataaggctggttttagagctagaaatagcaagttaaaataaggctagtccgttatcaacttgaaaaagtggcaccgagtcggtgcgccccagcagcttcagtccctttctcgtcgatggtcagcacagccttatgcacgg

SEQ ID NO: 24715 - RNA, 150 nt, synthetic construct
  source 1..150: mol_type = other RNA
  modified_base 1: mod_base = OTHER; note = 2'O-methyl cytidine phosphorothioate
  modified_base 2: mod_base = OTHER; note = 2'O-methyl cytidine phosphorothioate
  modified_base 3: mod_base = OTHER; note = 2'O-methyl adenosine phosphorothioate
  modified_base 147: mod_base = OTHER; note = cytidine phosphorothioate
  modified_base 148: mod_base = OTHER; note = 2'O-methyl adenosine phosphorothioate
  modified_base 149: mod_base = OTHER; note = 2'O-methyl cytidine phosphorothioate
  modified_base 150: mod_base = OTHER; note = 2'O-methyl guanosine
ccaggccgtgcataaggctggttttagagctagaaatagcaagttaaaataaggctagtccgttatcaacttgaaaaagtggcaccgagtcggtgcgccccagcagcttcagtccctttctcgtcgatggtcagcacagccttatgcacg

SEQ ID NO: 24716 - RNA, 149 nt, synthetic construct
  source 1..149: mol_type = other RNA
  modified_base 1: mod_base = OTHER; note = 2'O-methyl cytidine phosphorothioate
  modified_base 2: mod_base = OTHER; note = 2'O-methyl cytidine phosphorothioate
  modified_base 3: mod_base = OTHER; note = 2'O-methyl adenosine phosphorothioate
  modified_base 146: mod_base = OTHER; note = guanosine phosphorothioate
  modified_base 147: mod_base = OTHER; note = 2'O-methyl cytidine phosphorothioate
  modified_base 148: mod_base = OTHER; note = 2'O-methyl adenosine phosphorothioate
  modified_base 149: mod_base = OTHER; note = 2'O-methyl cytidine
ccaggccgtgcataaggctggttttagagctagaaatagcaagttaaaataaggctagtccgttatcaacttgaaaaagtggcaccgagtcggtgcgccccagcagcttcagtccctttctcgtcgatggtcagcacagccttatgcac

SEQ ID NO: 24717 - RNA, 148 nt, synthetic construct
  source 1..148: mol_type = other RNA
  modified_base 1: mod_base = OTHER; note = 2'O-methyl cytidine phosphorothioate
  modified_base 2: mod_base = OTHER; note = 2'O-methyl cytidine phosphorothioate
  modified_base 3: mod_base = OTHER; note = 2'O-methyl adenosine phosphorothioate
  modified_base 145: mod_base = OTHER; note = uridine phosphorothioate
  modified_base 146: mod_base = OTHER; note = 2'O-methyl guanosine phosphorothioate
  modified_base 147: mod_base = OTHER; note = 2'O-methyl cytidine phosphorothioate
  modified_base 148: mod_base = OTHER; note = 2'O-methyl adenosine
ccaggccgtgcataaggctggttttagagctagaaatagcaagttaaaataaggctagtccgttatcaacttgaaaaagtggcaccgagtcggtgcgccccagcagcttcagtccctttctcgtcgatggtcagcacagccttatgca

SEQ ID NO: 24718 - RNA, 147 nt, synthetic construct
  source 1..147: mol_type = other RNA
  modified_base 1: mod_base = OTHER; note = 2'O-methyl cytidine phosphorothioate
  modified_base 2: mod_base = OTHER; note = 2'O-methyl cytidine phosphorothioate
  modified_base 3: mod_base = OTHER; note = 2'O-methyl adenosine phosphorothioate
  modified_base 144: mod_base = OTHER; note = adenosine phosphorothioate
  modified_base 145: mod_base = OTHER; note = 2'O-methyl uridine phosphorothioate
  modified_base 146: mod_base = OTHER; note = 2'O-methyl guanosine phosphorothioate
  modified_base 147: mod_base = OTHER; note = 2'O-methyl cytidine
ccaggccgtgcataaggctggttttagagctagaaatagcaagttaaaataaggctagtccgttatcaacttgaaaaagtggcaccgagtcggtgcgccccagcagcttcagtccctttctcgtcgatggtcagcacagccttatgc

SEQ ID NO: 24719 - RNA, 151 nt, synthetic construct
  source 1..151: mol_type = other RNA
  modified_base 1: mod_base = OTHER; note = 2'O-methyl cytidine phosphorothioate
  modified_base 2: mod_base = OTHER; note = 2'O-methyl cytidine phosphorothioate
  modified_base 3: mod_base = OTHER; note = 2'O-methyl adenosine phosphorothioate
  modified_base 148: mod_base = OTHER; note = cytidine phosphorothioate
  modified_base 149: mod_base = OTHER; note = 2'O-methyl uridine phosphorothioate
  modified_base 150: mod_base = OTHER; note = 2'O-methyl guanosine phosphorothioate
  modified_base 151: mod_base = OTHER; note = 2'O-methyl guanosine
ccaggccgtgcataaggctggttttagagctagaaatagcaagttaaaataaggctagtccgttatcaacttgaaaaagtggcaccgagtcggtgcagcagcttcagtccctttctcgtcgatggtcagcacagccttatgcacggcctgg

SEQ ID NO: 24720 - RNA, 150 nt, synthetic construct
  source 1..150: mol_type = other RNA
  modified_base 1: mod_base = OTHER; note = 2'O-methyl cytidine phosphorothioate
  modified_base 2: mod_base = OTHER; note = 2'O-methyl cytidine phosphorothioate
  modified_base 3: mod_base = OTHER; note = 2'O-methyl adenosine phosphorothioate
  modified_base 147: mod_base = OTHER; note = cytidine phosphorothioate
  modified_base 148: mod_base = OTHER; note = 2'O-methyl cytidine phosphorothioate
  modified_base 149: mod_base = OTHER; note = 2'O-methyl uridine phosphorothioate
  modified_base 150: mod_base = OTHER; note = 2'O-methyl guanosine
ccaggccgtgcataaggctggttttagagctagaaatagcaagttaaaataaggctagtccgttatcaacttgaaaaagtggcaccgagtcggtgcagcagcttcagtccctttctcgtcgatggtcagcacagccttatgcacggcctg

SEQ ID NO: 24721 - RNA, 149 nt, synthetic construct
  source 1..149: mol_type = other RNA
  modified_base 1: mod_base = OTHER; note = 2'O-methyl cytidine phosphorothioate
  modified_base 2: mod_base = OTHER; note = 2'O-methyl cytidine phosphorothioate
  modified_base 3: mod_base = OTHER; note = 2'O-methyl adenosine phosphorothioate
  modified_base 146: mod_base = OTHER; note = guanosine phosphorothioate
  modified_base 147: mod_base = OTHER; note = 2'O-methyl cytidine phosphorothioate
  modified_base 148: mod_base = OTHER; note = 2'O-methyl cytidine phosphorothioate
  modified_base 149: mod_base = OTHER; note = 2'O-methyl uridine
ccaggccgtgcataaggctggttttagagctagaaatagcaagttaaaataaggctagtccgttatcaacttgaaaaagtggcaccgagtcggtgcagcagcttcagtccctttctcgtcgatggtcagcacagccttatgcacggcct

SEQ ID NO: 24722 - RNA, 148 nt, synthetic construct
  source 1..148: mol_type = other RNA
  modified_base 1: mod_base = OTHER; note = 2'O-methyl cytidine phosphorothioate
  modified_base 2: mod_base = OTHER; note = 2'O-methyl cytidine phosphorothioate
  modified_base 3: mod_base = OTHER; note = 2'O-methyl adenosine phosphorothioate
  modified_base 145: mod_base = OTHER; note = guanosine phosphorothioate
  modified_base 146: mod_base = OTHER; note = 2'O-methyl guanosine phosphorothioate
  modified_base 147: mod_base = OTHER; note = 2'O-methyl cytidine phosphorothioate
  modified_base 148: mod_base = OTHER; note = 2'O-methyl cytidine
ccaggccgtgcataaggctggttttagagctagaaatagcaagttaaaataaggctagtccgttatcaacttgaaaaagtggcaccgagtcggtgcagcagcttcagtccctttctcgtcgatggtcagcacagccttatgcacggcc

SEQ ID NO: 24723 - RNA, 147 nt, synthetic construct
  source 1..147: mol_type = other RNA
  modified_base 1: mod_base = OTHER; note = 2'O-methyl cytidine phosphorothioate
  modified_base 2: mod_base = OTHER; note = 2'O-methyl cytidine phosphorothioate
  modified_base 3: mod_base = OTHER; note = 2'O-methyl adenosine phosphorothioate
  modified_base 144: mod_base = OTHER; note = cytidine phosphorothioate
  modified_base 145: mod_base = OTHER; note = 2'O-methyl guanosine phosphorothioate
  modified_base 146: mod_base = OTHER; note = 2'O-methyl guanosine phosphorothioate
  modified_base 147: mod_base = OTHER; note = 2'O-methyl cytidine
ccaggccgtgcataaggctggttttagagctagaaatagcaagttaaaataaggctagtccgttatcaacttgaaaaagtggcaccgagtcggtgcagcagcttcagtccctttctcgtcgatggtcagcacagccttatgcacggc

SEQ ID NO: 24724 - RNA, 146 nt, synthetic construct
  source 1..146: mol_type = other RNA
  modified_base 1: mod_base = OTHER; note = 2'O-methyl cytidine phosphorothioate
  modified_base 2: mod_base = OTHER; note = 2'O-methyl cytidine phosphorothioate
  modified_base 3: mod_base = OTHER; note = 2'O-methyl adenosine phosphorothioate
  modified_base 143: mod_base = OTHER; note = adenosine phosphorothioate
  modified_base 144: mod_base = OTHER; note = 2'O-methyl cytidine phosphorothioate
  modified_base 145: mod_base = OTHER; note = 2'O-methyl guanosine phosphorothioate
  modified_base 146: mod_base = OTHER; note = 2'O-methyl guanosine
ccaggccgtgcataaggctggttttagagctagaaatagcaagttaaaataaggctagtccgttatcaacttgaaaaagtggcaccgagtcggtgcagcagcttcagtccctttctcgtcgatggtcagcacagccttatgcacgg

SEQ ID NO: 24725 - RNA, 145 nt, synthetic construct
  source 1..145: mol_type = other RNA
  modified_base 1: mod_base = OTHER; note = 2'O-methyl cytidine phosphorothioate
  modified_base 2: mod_base = OTHER; note = 2'O-methyl cytidine phosphorothioate
  modified_base 3: mod_base = OTHER; note = 2'O-methyl adenosine phosphorothioate
  modified_base 142: mod_base = OTHER; note = cytidine phosphorothioate
  modified_base 143: mod_base = OTHER; note = 2'O-methyl adenosine phosphorothioate
  modified_base 144: mod_base = OTHER; note = 2'O-methyl cytidine phosphorothioate
  modified_base 145: mod_base = OTHER; note = 2'O-methyl guanosine
ccaggccgtgcataaggctggttttagagctagaaatagcaagttaaaataaggctagtccgttatcaacttgaaaaagtggcaccgagtcggtgcagcagcttcagtccctttctcgtcgatggtcagcacagccttatgcacg

SEQ ID NO: 24726 - RNA, 144 nt, synthetic construct
  source 1..144: mol_type = other RNA
  modified_base 1: mod_base = OTHER; note = 2'O-methyl cytidine phosphorothioate
  modified_base 2: mod_base = OTHER; note = 2'O-methyl cytidine phosphorothioate
  modified_base 3: mod_base = OTHER; note = 2'O-methyl adenosine phosphorothioate
  modified_base 141: mod_base = OTHER; note = guanosine phosphorothioate
  modified_base 142: mod_base = OTHER; note = 2'O-methyl cytidine phosphorothioate
  modified_base 143: mod_base = OTHER; note = 2'O-methyl adenosine phosphorothioate
  modified_base 144: mod_base = OTHER; note = 2'O-methyl cytidine
ccaggccgtgcataaggctggttttagagctagaaatagcaagttaaaataaggctagtccgttatcaacttgaaaaagtggcaccgagtcggtgcagcagcttcagtccctttctcgtcgatggtcagcacagccttatgcac

SEQ ID NO: 24727 - RNA, 143 nt, synthetic construct
  source 1..143: mol_type = other RNA
  modified_base 1: mod_base = OTHER; note = 2'O-methyl cytidine phosphorothioate
  modified_base 2: mod_base = OTHER; note = 2'O-methyl cytidine phosphorothioate
  modified_base 3: mod_base = OTHER; note = 2'O-methyl adenosine phosphorothioate
  modified_base 140: mod_base = OTHER; note = uridine phosphorothioate
  modified_base 141: mod_base = OTHER; note = 2'O-methyl guanosine phosphorothioate
  modified_base 142: mod_base = OTHER; note = 2'O-methyl cytidine phosphorothioate
  modified_base 143: mod_base = OTHER; note = 2'O-methyl adenosine
ccaggccgtgcataaggctggttttagagctagaaatagcaagttaaaataaggctagtccgttatcaacttgaaaaagtggcaccgagtcggtgcagcagcttcagtccctttctcgtcgatggtcagcacagccttatgca

SEQ ID NO: 24728 - RNA, 142 nt, synthetic construct
  source 1..142: mol_type = other RNA
  modified_base 1: mod_base = OTHER; note = 2'O-methyl cytidine phosphorothioate
  modified_base 2: mod_base = OTHER; note = 2'O-methyl cytidine phosphorothioate
  modified_base 3: mod_base = OTHER; note = 2'O-methyl adenosine phosphorothioate
  modified_base 139: mod_base = OTHER; note = adenosine phosphorothioate
  modified_base 140: mod_base = OTHER; note = 2'O-methyl uridine phosphorothioate
  modified_base 141: mod_base = OTHER; note = 2'O-methyl guanosine phosphorothioate
  modified_base 142: mod_base = OTHER; note = 2'O-methyl cytidine
ccaggccgtgcataaggctggttttagagctagaaatagcaagttaaaataaggctagtccgttatcaacttgaaaaagtggcaccgagtcggtgcagcagcttcagtccctttctcgtcgatggtcagcacagccttatgc

SEQ ID NO: 24729 - RNA, 145 nt, synthetic construct
  source 1..145: mol_type = other RNA
  modified_base 1: mod_base = OTHER; note = 2'O-methyl cytidine phosphorothioate
  modified_base 2: mod_base = OTHER; note = 2'O-methyl cytidine phosphorothioate
  modified_base 3: mod_base = OTHER; note = 2'O-methyl adenosine phosphorothioate
  modified_base 142: mod_base = OTHER; note = cytidine phosphorothioate
  modified_base 143: mod_base = OTHER; note = 2'O-methyl uridine phosphorothioate
  modified_base 144: mod_base = OTHER; note = 2'O-methyl guanosine phosphorothioate
  modified_base 145: mod_base = OTHER; note = 2'O-methyl guanosine
ccaggccgtgcataaggctggttttagagctagaaatagcaagttaaaataaggctagtccgttatcaacttgaaaaagtggcaccgagtcggtgcttcagtccctttctcgtcgatggtcagcacagccttatgcacggcctgg

SEQ ID NO: 24730 - RNA, 144 nt, synthetic construct
  source 1..144: mol_type = other RNA
  modified_base 1: mod_base = OTHER; note = 2'O-methyl cytidine phosphorothioate
  modified_base 2: mod_base = OTHER; note = 2'O-methyl cytidine phosphorothioate
  modified_base 3: mod_base = OTHER; note = 2'O-methyl adenosine phosphorothioate
  modified_base 141: mod_base = OTHER; note = cytidine phosphorothioate
  modified_base 142: mod_base = OTHER; note = 2'O-methyl cytidine phosphorothioate
  modified_base 143: mod_base = OTHER; note = 2'O-methyl uridine phosphorothioate
  modified_base 144: mod_base = OTHER; note = 2'O-methyl guanosine
ccaggccgtgcataaggctggttttagagctagaaatagcaagttaaaataaggctagtccgttatcaacttgaaaaagtggcaccgagtcggtgcttcagtccctttctcgtcgatggtcagcacagccttatgcacggcctg

SEQ ID NO: 24731 - RNA, 143 nt, synthetic construct
  source 1..143: mol_type = other RNA
  modified_base 1: mod_base = OTHER; note = 2'O-methyl cytidine phosphorothioate
  modified_base 2: mod_base = OTHER; note = 2'O-methyl cytidine phosphorothioate
  modified_base 3: mod_base = OTHER; note = 2'O-methyl adenosine phosphorothioate
  modified_base 140: mod_base = OTHER; note = guanosine phosphorothioate
  modified_base 141: mod_base = OTHER; note = 2'O-methyl cytidine phosphorothioate
  modified_base 142: mod_base = OTHER; note = 2'O-methyl cytidine phosphorothioate
  modified_base 143: mod_base = OTHER; note = 2'O-methyl uridine
ccaggccgtgcataaggctggttttagagctagaaatagcaagttaaaataaggctagtccgttatcaacttgaaaaagtggcaccgagtcggtgcttcagtccctttctcgtcgatggtcagcacagccttatgcacggcct

SEQ ID NO: 24732 - RNA, 142 nt, synthetic construct
  source 1..142: mol_type = other RNA
  modified_base 1: mod_base = OTHER; note = 2'O-methyl cytidine phosphorothioate
  modified_base 2: mod_base = OTHER; note = 2'O-methyl cytidine phosphorothioate
  modified_base 3: mod_base = OTHER; note = 2'O-methyl adenosine phosphorothioate
  modified_base 139: mod_base = OTHER; note = guanosine phosphorothioate
  modified_base 140: mod_base = OTHER; note = 2'O-methyl guanosine phosphorothioate
  modified_base 141: mod_base = OTHER; note = 2'O-methyl cytidine phosphorothioate
  modified_base 142: mod_base = OTHER; note = 2'O-methyl cytidine
ccaggccgtgcataaggctggttttagagctagaaatagcaagttaaaataaggctagtccgttatcaacttgaaaaagtggcaccgagtcggtgcttcagtccctttctcgtcgatggtcagcacagccttatgcacggcc

SEQ ID NO: 24733 - RNA, 141 nt, synthetic construct
  source 1..141: mol_type = other RNA
  modified_base 1: mod_base = OTHER; note = 2'O-methyl cytidine phosphorothioate
  modified_base 2: mod_base = OTHER; note = 2'O-methyl cytidine phosphorothioate
  modified_base 3: mod_base = OTHER; note = 2'O-methyl adenosine phosphorothioate
  modified_base 138: mod_base = OTHER; note = cytidine phosphorothioate
  modified_base 139: mod_base = OTHER; note = 2'O-methyl guanosine phosphorothioate
  modified_base 140: mod_base = OTHER; note = 2'O-methyl guanosine phosphorothioate
  modified_base 141: mod_base = OTHER; note = 2'O-methyl cytidine
ccaggccgtgcataaggctggttttagagctagaaatagcaagttaaaataaggctagtccgttatcaacttgaaaaagtggcaccgagtcggtgcttcagtccctttctcgtcgatggtcagcacagccttatgcacggc

SEQ ID NO: 24734 - RNA, 140 nt, synthetic construct
  source 1..140: mol_type = other RNA
  modified_base 1: mod_base = OTHER; note = 2'O-methyl cytidine phosphorothioate
  modified_base 2: mod_base = OTHER; note = 2'O-methyl cytidine phosphorothioate
  modified_base 3: mod_base = OTHER; note = 2'O-methyl adenosine phosphorothioate
  modified_base 137: mod_base = OTHER; note = adenosine phosphorothioate
  modified_base 138: mod_base = OTHER; note = 2'O-methyl cytidine phosphorothioate
  modified_base 139: mod_base = OTHER; note = 2'O-methyl guanosine phosphorothioate
  modified_base 140: mod_base = OTHER; note = 2'O-methyl guanosine
ccaggccgtgcataaggctggttttagagctagaaatagcaagttaaaataaggctagtccgttatcaacttgaaaaagtggcaccgagtcggtgcttcagtccctttctcgtcgatggtcagcacagccttatgcacgg

SEQ ID NO: 24735 - RNA, 139 nt, synthetic construct
  source 1..139: mol_type = other RNA
  modified_base 1: mod_base = OTHER; note = 2'O-methyl cytidine phosphorothioate
  modified_base 2: mod_base = OTHER; note = 2'O-methyl cytidine phosphorothioate
  modified_base 3: mod_base = OTHER; note = 2'O-methyl adenosine phosphorothioate
  modified_base 136: mod_base = OTHER; note = cytidine phosphorothioate
  modified_base 137: mod_base = OTHER; note = 2'O-methyl adenosine phosphorothioate
  modified_base 138: mod_base = OTHER; note = 2'O-methyl cytidine phosphorothioate
  modified_base 139: mod_base = OTHER; note = 2'O-methyl guanosine
ccaggccgtgcataaggctggttttagagctagaaatagcaagttaaaataaggctagtccgttatcaacttgaaaaagtggcaccgagtcggtgcttcagtccctttctcgtcgatggtcagcacagccttatgcacg

SEQ ID NO: 24736 - RNA, 138 nt, synthetic construct
  source 1..138: mol_type = other RNA
  modified_base 1: mod_base = OTHER; note = 2'O-methyl cytidine phosphorothioate
  modified_base 2: mod_base = OTHER; note = 2'O-methyl cytidine phosphorothioate
  modified_base 3: mod_base = OTHER; note = 2'O-methyl adenosine phosphorothioate
  modified_base 135: mod_base = OTHER; note = guanosine phosphorothioate
  modified_base 136: mod_base = OTHER; note = 2'O-methyl cytidine phosphorothioate
  modified_base 137: mod_base = OTHER; note = 2'O-methyl adenosine phosphorothioate
  modified_base 138: mod_base = OTHER; note = 2'O-methyl cytidine
ccaggccgtgcataaggctggttttagagctagaaatagcaagttaaaataaggctagtccgttatcaacttgaaaaagtggcaccgagtcggtgcttcagtccctttctcgtcgatggtcagcacagccttatgcac

SEQ ID NO: 24737 - RNA, 137 nt, synthetic construct
  source 1..137: mol_type = other RNA
  modified_base 1: mod_base = OTHER; note = 2'O-methyl cytidine phosphorothioate
  modified_base 2: mod_base = OTHER; note = 2'O-methyl cytidine phosphorothioate
  modified_base 3: mod_base = OTHER; note = 2'O-methyl adenosine phosphorothioate
  modified_base 134: mod_base = OTHER; note = uridine phosphorothioate
  modified_base 135: mod_base = OTHER; note = 2'O-methyl guanosine phosphorothioate
  modified_base 136: mod_base = OTHER; note = 2'O-methyl cytidine phosphorothioate
  modified_base 137: mod_base = OTHER; note = 2'O-methyl adenosine
ccaggccgtgcataaggctggttttagagctagaaatagcaagttaaaataaggctagtccgttatcaacttgaaaaagtggcaccgagtcggtgcttcagtccctttctcgtcgatggtcagcacagccttatgca

SEQ ID NO: 24738 - RNA, 136 nt, synthetic construct
  source 1..136: mol_type = other RNA
  modified_base 1: mod_base = OTHER; note = 2'O-methyl cytidine phosphorothioate
  modified_base 2: mod_base = OTHER; note = 2'O-methyl cytidine phosphorothioate
  modified_base 3: mod_base = OTHER; note = 2'O-methyl adenosine phosphorothioate
  modified_base 133: mod_base = OTHER; note = adenosine phosphorothioate
  modified_base 134: mod_base = OTHER; note = 2'O-methyl uridine phosphorothioate
  modified_base 135: mod_base = OTHER; note = 2'O-methyl guanosine phosphorothioate
  modified_base 136: mod_base = OTHER; note = 2'O-methyl cytidine
ccaggccgtgcataaggctggttttagagctagaaatagcaagttaaaataaggctagtccgttatcaacttgaaaaagtggcaccgagtcggtgcttcagtccctttctcgtcgatggtcagcacagccttatgc

SEQ ID NO: 24739 - RNA, 142 nt, synthetic construct
  source 1..142: mol_type = other RNA
  modified_base 1: mod_base = OTHER; note = 2'O-methyl cytidine phosphorothioate
  modified_base 2: mod_base = OTHER; note = 2'O-methyl cytidine phosphorothioate
  modified_base 3: mod_base = OTHER; note = 2'O-methyl adenosine phosphorothioate
  modified_base 139: mod_base = OTHER; note = cytidine phosphorothioate
  modified_base 140: mod_base = OTHER; note = 2'O-methyl uridine phosphorothioate
  modified_base 141: mod_base = OTHER; note = 2'O-methyl guanosine phosphorothioate
  modified_base 142: mod_base = OTHER; note = 2'O-methyl guanosine
ccaggccgtgcataaggctggttttagagctagaaatagcaagttaaaataaggctagtccgttatcaacttgaaaaagtggcaccgagtcggtgcagtccctttctcgtcgatggtcagcacagccttatgcacggcctgg

SEQ ID NO: 24740 - RNA, 141 nt, synthetic construct
  source 1..141: mol_type = other RNA
  modified_base 1: mod_base = OTHER; note = 2'O-methyl cytidine phosphorothioate
  modified_base 2: mod_base = OTHER; note = 2'O-methyl cytidine phosphorothioate
  modified_base 3: mod_base = OTHER; note = 2'O-methyl adenosine phosphorothioate
  modified_base 138: mod_base = OTHER; note = cytidine phosphorothioate
  modified_base 139: mod_base = OTHER; note = 2'O-methyl cytidine phosphorothioate
  modified_base 140: mod_base = OTHER; note = 2'O-methyl uridine phosphorothioate
  modified_base 141: mod_base = OTHER; note = 2'O-methyl guanosine
ccaggccgtgcataaggctggttttagagctagaaatagcaagttaaaataaggctagtccgttatcaacttgaaaaagtggcaccgagtcggtgcagtccctttctcgtcgatggtcagcacagccttatgcacggcctg

SEQ ID NO: 24741 - RNA, 140 nt, synthetic construct
  source 1..140: mol_type = other RNA
  modified_base 1: mod_base = OTHER; note = 2'O-methyl cytidine phosphorothioate
  modified_base 2: mod_base = OTHER; note = 2'O-methyl cytidine phosphorothioate
  modified_base 3: mod_base = OTHER; note = 2'O-methyl adenosine phosphorothioate
  modified_base 137: mod_base = OTHER; note = guanosine phosphorothioate
  modified_base 138: mod_base = OTHER; note = 2'O-methyl cytidine phosphorothioate
  modified_base 139: mod_base = OTHER; note = 2'O-methyl cytidine phosphorothioate
  modified_base 140: mod_base = OTHER; note = 2'O-methyl uridine
ccaggccgtgcataaggctggttttagagctagaaatagcaagttaaaataaggctagtccgttatcaacttgaaaaagtggcaccgagtcggtgcagtccctttctcgtcgatggtcagcacagccttatgcacggcct

SEQ ID NO: 24742 - RNA, 139 nt, synthetic construct
  source 1..139: mol_type = other RNA
  modified_base 1: mod_base = OTHER; note = 2'O-methyl cytidine phosphorothioate
  modified_base 2: mod_base = OTHER; note = 2'O-methyl cytidine phosphorothioate
  modified_base 3: mod_base = OTHER; note = 2'O-methyl adenosine phosphorothioate
  modified_base 136: mod_base = OTHER; note = guanosine phosphorothioate
  modified_base 137: mod_base = OTHER; note = 2'O-methyl guanosine phosphorothioate
  modified_base 138: mod_base = OTHER; note = 2'O-methyl cytidine phosphorothioate
  modified_base 139: mod_base = OTHER; note = 2'O-methyl cytidine
ccaggccgtgcataaggctggttttagagctagaaatagcaagttaaaataaggctagtccgttatcaacttgaaaaagtggcaccgagtcggtgcagtccctttctcgtcgatggtcagcacagccttatgcacggcc

SEQ ID NO: 24743 - RNA, 138 nt, synthetic construct
  source 1..138: mol_type = other RNA
  modified_base 1: mod_base = OTHER; note = 2'O-methyl cytidine phosphorothioate
  modified_base 2: mod_base = OTHER; note = 2'O-methyl cytidine phosphorothioate
  modified_base 3: mod_base = OTHER; note = 2'O-methyl adenosine phosphorothioate
  modified_base 135: mod_base = OTHER; note = cytidine phosphorothioate
  modified_base 136: mod_base = OTHER; note = 2'O-methyl guanosine phosphorothioate
  modified_base 137: mod_base = OTHER; note = 2'O-methyl guanosine phosphorothioate
  modified_base 138: mod_base = OTHER; note = 2'O-methyl cytidine
ccaggccgtgcataaggctggttttagagctagaaatagcaagttaaaataaggctagtccgttatcaacttgaaaaagtggcaccgagtcggtgcagtccctttctcgtcgatggtcagcacagccttatgcacggc

SEQ ID NO: 24744 - RNA, 137 nt, synthetic construct
  source 1..137: mol_type = other RNA
  modified_base 1: mod_base = OTHER; note = 2'O-methyl cytidine phosphorothioate
  modified_base 2: mod_base = OTHER; note = 2'O-methyl cytidine phosphorothioate
  modified_base 3: mod_base = OTHER; note = 2'O-methyl adenosine phosphorothioate
  modified_base 134: mod_base = OTHER; note = adenosine phosphorothioate
  modified_base 135: mod_base = OTHER; note = 2'O-methyl cytidine phosphorothioate
  modified_base 136: mod_base = OTHER; note = 2'O-methyl guanosine phosphorothioate
  modified_base 137: mod_base = OTHER; note = 2'O-methyl guanosine
ccaggccgtgcataaggctggttttagagctagaaatagcaagttaaaataaggctagtccgttatcaacttgaaaaagtggcaccgagtcggtgcagtccctttctcgtcgatggtcagcacagccttatgcacgg

SEQ ID NO: 24745 - RNA, 136 nt, synthetic construct
  source 1..136: mol_type = other RNA
  modified_base 1: mod_base = OTHER; note = 2'O-methyl cytidine phosphorothioate
  modified_base 2: mod_base = OTHER; note = 2'O-methyl cytidine phosphorothioate
  modified_base 3: mod_base = OTHER; note = 2'O-methyl adenosine phosphorothioate
  modified_base 133: mod_base = OTHER; note = cytidine phosphorothioate
  modified_base 134: mod_base = OTHER; note = 2'O-methyl adenosine phosphorothioate
  modified_base 135: mod_base = OTHER; note = 2'O-methyl cytidine phosphorothioate
  modified_base 136: mod_base = OTHER; note = 2'O-methyl guanosine
ccaggccgtgcataaggctggttttagagctagaaatagcaagttaaaataaggctagtccgttatcaacttgaaaaagtggcaccgagtcggtgcagtccctttctcgtcgatggtcagcacagccttatgcacg

SEQ ID NO: 24746 - RNA, 135 nt, synthetic construct
  source 1..135: mol_type = other RNA
  modified_base 1: mod_base = OTHER; note = 2'O-methyl cytidine phosphorothioate
  modified_base 2: mod_base = OTHER; note = 2'O-methyl cytidine phosphorothioate
  modified_base 3: mod_base = OTHER; note = 2'O-methyl adenosine phosphorothioate
  modified_base 132: mod_base = OTHER; note = guanosine phosphorothioate
  modified_base 133: mod_base = OTHER; note = 2'O-methyl cytidine phosphorothioate
  modified_base 134: mod_base = OTHER; note = 2'O-methyl adenosine phosphorothioate
  modified_base 135: mod_base = OTHER; note = 2'O-methyl cytidine
ccaggccgtgcataaggctggttttagagctagaaatagcaagttaaaataaggctagtccgttatcaacttgaaaaagtggcaccgagtcggtgcagtccctttctcgtcgatggtcagcacagccttatgcac

SEQ ID NO: 24747 - RNA, 134 nt, synthetic construct
  source 1..134: mol_type = other RNA
  modified_base 1: mod_base = OTHER; note = 2'O-methyl cytidine phosphorothioate
  modified_base 2: mod_base = OTHER; note = 2'O-methyl cytidine phosphorothioate
  modified_base 3: mod_base = OTHER; note = 2'O-methyl adenosine phosphorothioate
  modified_base 131: mod_base = OTHER; note = uridine phosphorothioate
  modified_base 132: mod_base = OTHER; note = 2'O-methyl guanosine phosphorothioate
  modified_base 133: mod_base = OTHER; note = 2'O-methyl cytidine phosphorothioate
  modified_base 134: mod_base = OTHER; note = 2'O-methyl adenosine
ccaggccgtgcataaggctggttttagagctagaaatagcaagttaaaataaggctagtccgttatcaacttgaaaaagtggcaccgagtcggtgcagtccctttctcgtcgatggtcagcacagccttatgca

SEQ ID NO: 24748 - RNA, 133 nt, synthetic construct
  source 1..133: mol_type = other RNA
  modified_base 1: mod_base = OTHER; note = 2'O-methyl cytidine phosphorothioate
  modified_base 2: mod_base = OTHER; note = 2'O-methyl cytidine phosphorothioate
  modified_base 3: mod_base = OTHER; note = 2'O-methyl adenosine phosphorothioate
  modified_base 130: mod_base = OTHER; note = adenosine phosphorothioate
  modified_base 131: mod_base = OTHER; note = 2'O-methyl uridine phosphorothioate
  modified_base 132: mod_base = OTHER; note = 2'O-methyl guanosine phosphorothioate
  modified_base 133: mod_base = OTHER; note = 2'O-methyl cytidine
ccaggccgtgcataaggctggttttagagctagaaatagcaagttaaaataaggctagtccgttatcaacttgaaaaagtggcaccgagtcggtgcagtccctttctcgtcgatggtcagcacagccttatgc

SEQ ID NO: 24749 - RNA, 140 nt, synthetic construct
  source 1..140: mol_type = other RNA
  modified_base 1: mod_base = OTHER; note = 2'O-methyl cytidine phosphorothioate
  modified_base 2: mod_base = OTHER; note = 2'O-methyl cytidine phosphorothioate
  modified_base 3: mod_base = OTHER; note = 2'O-methyl adenosine phosphorothioate
  modified_base 137: mod_base = OTHER; note = cytidine phosphorothioate
  modified_base 138: mod_base = OTHER; note = 2'O-methyl uridine phosphorothioate
  modified_base 139: mod_base = OTHER; note = 2'O-methyl guanosine phosphorothioate
  modified_base 140: mod_base = OTHER; note = 2'O-methyl guanosine
ccaggccgtgcataaggctggttttagagctagaaatagcaagttaaaataaggctagtccgttatcaacttgaaaaagtggcaccgagtcggtgctccctttctcgtcgatggtcagcacagccttatgcacggcctgg

SEQ ID NO: 24750 - RNA, 139 nt, synthetic construct
  source 1..139: mol_type = other RNA
  modified_base 1: mod_base = OTHER; note = 2'O-methyl cytidine phosphorothioate
  modified_base 2: mod_base = OTHER; note = 2'O-methyl cytidine phosphorothioate
  modified_base 3: mod_base = OTHER; note = 2'O-methyl adenosine phosphorothioate
  modified_base 136: mod_base = OTHER; note = cytidine phosphorothioate
  modified_base 137: mod_base = OTHER; note = 2'O-methyl cytidine phosphorothioate
  modified_base 138: mod_base = OTHER; note = 2'O-methyl uridine phosphorothioate
  modified_base 139: mod_base = OTHER; note = 2'O-methyl guanosine
ccaggccgtgcataaggctggttttagagctagaaatagcaagttaaaataaggctagtccgttatcaacttgaaaaagtggcaccgagtcggtgctccctttctcgtcgatggtcagcacagccttatgcacggcctg

SEQ ID NO: 24751 - RNA, 138 nt, synthetic construct
  source 1..138: mol_type = other RNA
  modified_base 1: mod_base = OTHER; note = 2'O-methyl cytidine phosphorothioate
  modified_base 2: mod_base = OTHER; note = 2'O-methyl cytidine phosphorothioate
  modified_base 3: mod_base = OTHER; note = 2'O-methyl adenosine phosphorothioate
  modified_base 135: mod_base = OTHER; note = guanosine phosphorothioate
  modified_base 136: mod_base = OTHER; note = 2'O-methyl cytidine phosphorothioate
  modified_base 137: mod_base = OTHER; note = 2'O-methyl cytidine phosphorothioate
  modified_base 138: mod_base = OTHER; note = 2'O-methyl uridine
ccaggccgtgcataaggctggttttagagctagaaatagcaagttaaaataaggctagtccgttatcaacttgaaaaagtggcaccgagtcggtgctccctttctcgtcgatggtcagcacagccttatgcacggcct

SEQ ID NO: 24752 - RNA, 137 nt, synthetic construct
  source 1..137: mol_type = other RNA
  modified_base 1: mod_base = OTHER; note = 2'O-methyl cytidine phosphorothioate
  modified_base 2: mod_base = OTHER; note = 2'O-methyl cytidine phosphorothioate
  modified_base 3: mod_base = OTHER; note = 2'O-methyl adenosine phosphorothioate
  modified_base 134: mod_base = OTHER; note = guanosine phosphorothioate
  modified_base 135: mod_base = OTHER; note = 2'O-methyl guanosine phosphorothioate
  modified_base 136: mod_base = OTHER; note = 2'O-methyl cytidine phosphorothioate
  modified_base 137: mod_base = OTHER; note = 2'O-methyl cytidine
ccaggccgtgcataaggctggttttagagctagaaatagcaagttaaaataaggctagtccgttatcaacttgaaaaagtggcaccgagtcggtgctccctttctcgtcgatggtcagcacagccttatgcacggcc

SEQ ID NO: 24753 - RNA, 136 nt, synthetic construct
  source 1..136: mol_type = other RNA
  modified_base 1: mod_base = OTHER; note = 2'O-methyl cytidine phosphorothioate
  modified_base 2: mod_base = OTHER; note = 2'O-methyl cytidine phosphorothioate
  modified_base 3: mod_base = OTHER; note = 2'O-methyl adenosine phosphorothioate
  modified_base 133: mod_base = OTHER; note = cytidine phosphorothioate
  modified_base 134: mod_base = OTHER; note = 2'O-methyl guanosine phosphorothioate
  modified_base 135: mod_base = OTHER; note = 2'O-methyl guanosine phosphorothioate
  modified_base 136: mod_base = OTHER; note = 2'O-methyl cytidine
ccaggccgtgcataaggctggttttagagctagaaatagcaagttaaaataaggctagtccgttatcaacttgaaaaagtggcaccgagtcggtgctccctttctcgtcgatggtcagcacagccttatgcacggc

SEQ ID NO: 24754 - RNA, 135 nt, synthetic construct
  source 1..135: mol_type = other RNA
  modified_base 1: mod_base = OTHER; note = 2'O-methyl cytidine phosphorothioate
  modified_base 2: mod_base = OTHER; note = 2'O-methyl cytidine phosphorothioate
  modified_base 3: mod_base = OTHER; note = 2'O-methyl adenosine phosphorothioate
  modified_base 132: mod_base = OTHER; note = adenosine phosphorothioate
  modified_base 133: mod_base = OTHER; note = 2'O-methyl cytidine phosphorothioate
  modified_base 134: mod_base = OTHER; note = 2'O-methyl guanosine phosphorothioate
  modified_base 135: mod_base = OTHER; note = 2'O-methyl guanosine
ccaggccgtgcataaggctggttttagagctagaaatagcaagttaaaataaggctagtccgttatcaacttgaaaaagtggcaccgagtcggtgctccctttctcgtcgatggtcagcacagccttatgcacgg

SEQ ID NO: 24755 - RNA, 134 nt, synthetic construct
  source 1..134: mol_type = other RNA
  modified_base 1: mod_base = OTHER; note = 2'O-methyl cytidine phosphorothioate
  modified_base 2: mod_base = OTHER; note = 2'O-methyl cytidine phosphorothioate
  modified_base 3: mod_base = OTHER; note = 2'O-methyl adenosine phosphorothioate
  modified_base 131: mod_base = OTHER; note = cytidine phosphorothioate
  modified_base 132: mod_base = OTHER; note = 2'O-methyl adenosine phosphorothioate
  modified_base 133: mod_base = OTHER; note = 2'O-methyl cytidine phosphorothioate
  modified_base 134: mod_base = OTHER; note = 2'O-methyl guanosine
ccaggccgtgcataaggctggttttagagctagaaatagcaagttaaaataaggctagtccgttatcaacttgaaaaagtggcaccgagtcggtgctccctttctcgtcgatggtcagcacagccttatgcacg

SEQ ID NO: 24756 - RNA, 133 nt, synthetic construct
  source 1..133: mol_type = other RNA
  modified_base 1: mod_base = OTHER; note = 2'O-methyl cytidine phosphorothioate
  modified_base 2: mod_base = OTHER; note = 2'O-methyl cytidine phosphorothioate
  modified_base 3: mod_base = OTHER; note = 2'O-methyl adenosine phosphorothioate
  modified_base 130: mod_base = OTHER; note = guanosine phosphorothioate
  modified_base 131: mod_base = OTHER; note = 2'O-methyl cytidine phosphorothioate
  modified_base 132: mod_base = OTHER; note = 2'O-methyl adenosine phosphorothioate
  modified_base 133: mod_base = OTHER; note = 2'O-methyl cytidine
ccaggccgtgcataaggctggttttagagctagaaatagcaagttaaaataaggctagtccgttatcaacttgaaaaagtggcaccgagtcggtgctccctttctcgtcgatggtcagcacagccttatgcac

SEQ ID NO: 24757 - RNA, 132 nt, synthetic construct
  source 1..132: mol_type = other RNA
  modified_base 1: mod_base = OTHER; note = 2'O-methyl cytidine phosphorothioate
  modified_base 2: mod_base = OTHER; note = 2'O-methyl cytidine phosphorothioate
  modified_base 3: mod_base = OTHER; note = 2'O-methyl adenosine phosphorothioate
  modified_base 129: mod_base = OTHER; note = uridine phosphorothioate
  modified_base 130: mod_base = OTHER; note = 2'O-methyl guanosine phosphorothioate
  modified_base 131: mod_base = OTHER; note = 2'O-methyl cytidine phosphorothioate
  modified_base 132: mod_base = OTHER; note = 2'O-methyl adenosine
ccaggccgtgcataaggctggttttagagctagaaatagcaagttaaaataaggctagtccgttatcaacttgaaaaagtggcaccgagtcggtgctccctttctcgtcgatggtcagcacagccttatgca

SEQ ID NO: 24758 - RNA, 131 nt, synthetic construct
  source 1..131: mol_type = other RNA
  modified_base 1: mod_base = OTHER; note = 2'O-methyl cytidine phosphorothioate
  modified_base 2: mod_base = OTHER; note = 2'O-methyl cytidine phosphorothioate
  modified_base 3: mod_base = OTHER; note = 2'O-methyl adenosine phosphorothioate
  modified_base 128: mod_base = OTHER; note = adenosine phosphorothioate
  modified_base 129: mod_base = OTHER; note = 2'O-methyl uridine phosphorothioate
  modified_base 130: mod_base = OTHER; note = 2'O-methyl guanosine phosphorothioate
  modified_base 131: mod_base = OTHER; note = 2'O-methyl cytidine
ccaggccgtgcataaggctggttttagagctagaaatagcaagttaaaataaggctagtccgttatcaacttgaaaaagtggcaccgagtcggtgctccctttctcgtcgatggtcagcacagccttatgc

SEQ ID NO: 24759 - RNA, 138 nt, synthetic construct
  source 1..138: mol_type = other RNA
  modified_base 1: mod_base = OTHER; note = 2'O-methyl cytidine phosphorothioate
  modified_base 2: mod_base = OTHER; note = 2'O-methyl cytidine phosphorothioate
  modified_base 3: mod_base = OTHER; note = 2'O-methyl adenosine phosphorothioate
  modified_base 135: mod_base = OTHER; note = cytidine phosphorothioate
  modified_base 136: mod_base = OTHER; note = 2'O-methyl uridine phosphorothioate
  modified_base 137: mod_base = OTHER; note = 2'O-methyl guanosine phosphorothioate
  modified_base 138: mod_base = OTHER; note = 2'O-methyl guanosine
ccaggccgtgcataaggctggttttagagctagaaatagcaagttaaaataaggctagtccgttatcaacttgaaaaagtggcaccgagtcggtgccctttctcgtcgatggtcagcacagccttatgcacggcctgg

SEQ ID NO: 24760 - RNA, 137 nt, synthetic construct
  source 1..137: mol_type = other RNA
  modified_base 1: mod_base = OTHER; note = 2'O-methyl cytidine phosphorothioate
  modified_base 2: mod_base = OTHER; note = 2'O-methyl cytidine phosphorothioate
  modified_base 3: mod_base = OTHER; note = 2'O-methyl adenosine phosphorothioate
  modified_base 134: mod_base = OTHER; note = cytidine phosphorothioate
  modified_base 135: mod_base = OTHER; note = 2'O-methyl cytidine phosphorothioate
  modified_base 136: mod_base = OTHER; note = 2'O-methyl uridine phosphorothioate
  modified_base 137: mod_base = OTHER; note = 2'O-methyl guanosine
ccaggccgtgcataaggctggttttagagctagaaatagcaagttaaaataaggctagtccgttatcaacttgaaaaagtggcaccgagtcggtgccctttctcgtcgatggtcagcacagccttatgcacggcctg

SEQ ID NO: 24761 - RNA, 136 nt, synthetic construct
  source 1..136: mol_type = other RNA
  modified_base 1: mod_base = OTHER; note = 2'O-methyl cytidine phosphorothioate
  modified_base 2: mod_base = OTHER; note = 2'O-methyl cytidine phosphorothioate
  modified_base 3: mod_base = OTHER; note = 2'O-methyl adenosine phosphorothioate
  modified_base 133: mod_base = OTHER; note = guanosine phosphorothioate
  modified_base 134: mod_base = OTHER; note = 2'O-methyl cytidine phosphorothioate
  modified_base 135: mod_base = OTHER; note = 2'O-methyl cytidine phosphorothioate
  modified_base 136: mod_base = OTHER; note = 2'O-methyl uridine
ccaggccgtgcataaggctggttttagagctagaaatagcaagttaaaataaggctagtccgttatcaacttgaaaaagtggcaccgagtcggtgccctttctcgtcgatggtcagcacagccttatgcacggcct

SEQ ID NO: 24762 - RNA, 135 nt, synthetic construct
  source 1..135: mol_type = other RNA
  modified_base 1: mod_base = OTHER; note = 2'O-methyl cytidine phosphorothioate
  modified_base 2: mod_base = OTHER; note = 2'O-methyl cytidine phosphorothioate
  modified_base 3: mod_base = OTHER; note = 2'O-methyl adenosine phosphorothioate
  modified_base 132: mod_base = OTHER; note = guanosine phosphorothioate
  modified_base 133: mod_base = OTHER; note = 2'O-methyl guanosine phosphorothioate
  modified_base 134: mod_base = OTHER; note = 2'O-methyl cytidine phosphorothioate
  modified_base 135: mod_base = OTHER; note = 2'O-methyl cytidine
ccaggccgtgcataaggctggttttagagctagaaatagcaagttaaaataaggctagtccgttatcaacttgaaaaagtggcaccgagtcggtgccctttctcgtcgatggtcagcacagccttatgcacggcc

SEQ ID NO: 24763 - RNA, 134 nt, synthetic construct
  source 1..134: mol_type = other RNA
  modified_base 1: mod_base = OTHER; note = 2'O-methyl cytidine phosphorothioate
  modified_base 2: mod_base = OTHER; note = 2'O-methyl cytidine phosphorothioate
  modified_base 3: mod_base = OTHER; note = 2'O-methyl adenosine phosphorothioate
  modified_base 131: mod_base = OTHER; note = cytidine phosphorothioate
  modified_base 132: mod_base = OTHER; note = 2'O-methyl guanosine phosphorothioate
  modified_base 133: mod_base = OTHER; note = 2'O-methyl guanosine phosphorothioate
  modified_base 134: mod_base = OTHER; note = 2'O-methyl cytidine
ccaggccgtgcataaggctggttttagagctagaaatagcaagttaaaataaggctagtccgttatcaacttgaaaaagtggcaccgagtcggtgccctttctcgtcgatggtcagcacagccttatgcacggc

SEQ ID NO: 24764 - RNA, 133 nt, synthetic construct
  source 1..133: mol_type = other RNA
  modified_base 1: mod_base = OTHER; note = 2'O-methyl cytidine phosphorothioate
  modified_base 2: mod_base = OTHER; note = 2'O-methyl cytidine phosphorothioate
  modified_base 3: mod_base = OTHER; note = 2'O-methyl adenosine phosphorothioate
  modified_base 130: mod_base = OTHER; note = adenosine phosphorothioate
  modified_base 131: mod_base = OTHER; note = 2'O-methyl cytidine phosphorothioate
  modified_base 132: mod_base = OTHER; note = 2'O-methyl guanosine phosphorothioate
  modified_base 133: mod_base = OTHER; note = 2'O-methyl guanosine
ccaggccgtgcataaggctggttttagagctagaaatagcaagttaaaataaggctagtccgttatcaacttgaaaaagtggcaccgagtcggtgccctttctcgtcgatggtcagcacagccttatgcacgg

SEQ ID NO: 24765 - RNA, 132 nt, synthetic construct
  source 1..132: mol_type = other RNA
  modified_base 1: mod_base = OTHER; note = 2'O-methyl cytidine phosphorothioate
  modified_base 2: mod_base = OTHER; note = 2'O-methyl cytidine phosphorothioate
  modified_base 3: mod_base = OTHER; note = 2'O-methyl adenosine phosphorothioate
  modified_base 129: mod_base = OTHER; note = cytidine phosphorothioate
  modified_base 130: mod_base = OTHER; note = 2'O-methyl adenosine phosphorothioate
  modified_base 131: mod_base = OTHER; note = 2'O-methyl cytidine phosphorothioate
  modified_base 132: mod_base = OTHER; note = 2'O-methyl guanosine
ccaggccgtgcataaggctggttttagagctagaaatagcaagttaaaataaggctagtccgttatcaacttgaaaaagtggcaccgagtcggtgccctttctcgtcgatggtcagcacagccttatgcacg

SEQ ID NO: 24766 - RNA, 131 nt, synthetic construct
  source 1..131: mol_type = other RNA
  modified_base 1: mod_base = OTHER; note = 2'O-methyl cytidine phosphorothioate
  modified_base 2: mod_base = OTHER; note = 2'O-methyl cytidine phosphorothioate
  modified_base 3: mod_base = OTHER; note = 2'O-methyl adenosine phosphorothioate
  modified_base 128: mod_base = OTHER; note = guanosine phosphorothioate
  modified_base 129: mod_base = OTHER; note = 2'O-methyl cytidine phosphorothioate
  modified_base 130: mod_base = OTHER; note = 2'O-methyl adenosine phosphorothioate
  modified_base 131: mod_base = OTHER; note = 2'O-methyl cytidine
ccaggccgtgcataaggctggttttagagctagaaatagcaagttaaaataaggctagtccgttatcaacttgaaaaagtggcaccgagtcggtgccctttctcgtcgatggtcagcacagccttatgcac

SEQ ID NO: 24767 - RNA, 130 nt, synthetic construct
  source 1..130: mol_type = other RNA
  modified_base 1: mod_base = OTHER; note = 2'O-methyl cytidine phosphorothioate
  modified_base 2: mod_base = OTHER; note = 2'O-methyl cytidine phosphorothioate
  modified_base 3: mod_base = OTHER; note = 2'O-methyl adenosine phosphorothioate
  modified_base 127: mod_base = OTHER; note = uridine phosphorothioate
  modified_base 128: mod_base = OTHER; note = 2'O-methyl guanosine phosphorothioate
  modified_base 129: mod_base = OTHER; note = 2'O-methyl cytidine phosphorothioate
  modified_base 130: mod_base = OTHER; note = 2'O-methyl adenosine
ccaggccgtgcataaggctggttttagagctagaaatagcaagttaaaataaggctagtccgttatcaacttgaaaaagtggcaccgagtcggtgccctttctcgtcgatggtcagcacagccttatgca

SEQ ID NO: 24768 - RNA, 129 nt, synthetic construct
  source 1..129: mol_type = other RNA
  modified_base 1: mod_base = OTHER; note = 2'O-methyl cytidine phosphorothioate
  modified_base 2: mod_base = OTHER; note = 2'O-methyl cytidine phosphorothioate
  modified_base 3: mod_base = OTHER; note = 2'O-methyl adenosine phosphorothioate
  modified_base 126: mod_base = OTHER; note = adenosine phosphorothioate
  modified_base 127: mod_base = OTHER; note = 2'O-methyl uridine phosphorothioate
  modified_base 128: mod_base = OTHER; note = 2'O-methyl guanosine phosphorothioate
  modified_base 129: mod_base = OTHER; note = 2'O-methyl cytidine
ccaggccgtgcataaggctggttttagagctagaaatagcaagttaaaataaggctagtccgttatcaacttgaaaaagtggcaccgagtcggtgccctttctcgtcgatggtcagcacagccttatgc

SEQ ID NO: 24769 - RNA, 136 nt, synthetic construct
  source 1..136: mol_type = other RNA
  modified_base 1: mod_base = OTHER; note = 2'O-methyl cytidine phosphorothioate
  modified_base 2: mod_base = OTHER; note = 2'O-methyl cytidine phosphorothioate
  modified_base 3: mod_base = OTHER; note = 2'O-methyl adenosine phosphorothioate
  modified_base 133: mod_base = OTHER; note = cytidine phosphorothioate
  modified_base 134: mod_base = OTHER; note = 2'O-methyl uridine phosphorothioate
  modified_base 135: mod_base = OTHER; note = 2'O-methyl guanosine phosphorothioate
  modified_base 136: mod_base = OTHER; note = 2'O-methyl guanosine
ccaggccgtgcataaggctggttttagagctagaaatagcaagttaaaataaggctagtccgttatcaacttgaaaaagtggcaccgagtcggtgctttctcgtcgatggtcagcacagccttatgcacggcctgg

SEQ ID NO: 24770 - RNA, 135 nt, synthetic construct
  source 1..135: mol_type = other RNA
  modified_base 1: mod_base = OTHER; note = 2'O-methyl cytidine phosphorothioate
  modified_base 2: mod_base = OTHER; note = 2'O-methyl cytidine phosphorothioate
  modified_base 3: mod_base = OTHER; note = 2'O-methyl adenosine phosphorothioate
  modified_base 132: mod_base = OTHER; note = cytidine phosphorothioate
  modified_base 133: mod_base = OTHER; note = 2'O-methyl cytidine phosphorothioate
  modified_base 134: mod_base = OTHER; note = 2'O-methyl uridine phosphorothioate
  modified_base 135: mod_base = OTHER; note = 2'O-methyl guanosine
ccaggccgtgcataaggctggttttagagctagaaatagcaagttaaaataaggctagtccgttatcaacttgaaaaagtggcaccgagtcggtgctttctcgtcgatggtcagcacagccttatgcacggcctg

SEQ ID NO: 24771 - RNA, 134 nt, synthetic construct
  source 1..134: mol_type = other RNA
  modified_base 1: mod_base = OTHER; note = 2'O-methyl cytidine phosphorothioate
  modified_base 2: mod_base = OTHER; note = 2'O-methyl cytidine phosphorothioate
  modified_base 3: mod_base = OTHER; note = 2'O-methyl adenosine phosphorothioate
  modified_base 131: mod_base = OTHER; note = guanosine phosphorothioate
  modified_base 132: mod_base = OTHER; note = 2'O-methyl cytidine phosphorothioate
  modified_base 133: mod_base = OTHER; note = 2'O-methyl cytidine phosphorothioate
  modified_base 134: mod_base = OTHER; note = 2'O-methyl uridine
ccaggccgtgcataaggctggttttagagctagaaatagcaagttaaaataaggctagtccgttatcaacttgaaaaagtggcaccgagtcggtgctttctcgtcgatggtcagcacagccttatgcacggcct

SEQ ID NO: 24772 - RNA, 133 nt, synthetic construct
  source 1..133: mol_type = other RNA
  modified_base 1: mod_base = OTHER; note = 2'O-methyl cytidine phosphorothioate
  modified_base 2: mod_base = OTHER; note = 2'O-methyl cytidine phosphorothioate
  modified_base 3: mod_base = OTHER; note = 2'O-methyl adenosine phosphorothioate
  modified_base 130: mod_base = OTHER; note = guanosine phosphorothioate
  modified_base 131: mod_base = OTHER; note = 2'O-methyl guanosine phosphorothioate
  modified_base 132: mod_base = OTHER; note = 2'O-methyl cytidine phosphorothioate
  modified_base 133: mod_base = OTHER; note = 2'O-methyl cytidine
ccaggccgtgcataaggctggttttagagctagaaatagcaagttaaaataaggctagtccgttatcaacttgaaaaagtggcaccgagtcggtgctttctcgtcgatggtcagcacagccttatgcacggcc

SEQ ID NO: 24773 - RNA, 132 nt, synthetic construct
  source 1..132: mol_type = other RNA
  modified_base 1: mod_base = OTHER; note = 2'O-methyl cytidine phosphorothioate
  modified_base 2: mod_base = OTHER; note = 2'O-methyl cytidine phosphorothioate
  modified_base 3: mod_base = OTHER; note = 2'O-methyl adenosine phosphorothioate
  modified_base 129: mod_base = OTHER; note = cytidine phosphorothioate
  modified_base 130: mod_base = OTHER; note = 2'O-methyl guanosine phosphorothioate
  modified_base 131: mod_base = OTHER; note = 2'O-methyl guanosine phosphorothioate
  modified_base 132: mod_base = OTHER; note = 2'O-methyl cytidine
ccaggccgtgcataaggctggttttagagctagaaatagcaagttaaaataaggctagtccgttatcaacttgaaaaagtggcaccgagtcggtgctttctcgtcgatggtcagcacagccttatgcacggc

SEQ ID NO: 24774 - RNA, 131 nt, synthetic construct
  source 1..131: mol_type = other RNA
  modified_base 1: mod_base = OTHER; note = 2'O-methyl cytidine phosphorothioate
  modified_base 2: mod_base = OTHER; note = 2'O-methyl cytidine phosphorothioate
  modified_base 3: mod_base = OTHER; note = 2'O-methyl adenosine phosphorothioate
  modified_base 128: mod_base = OTHER; note = adenosine phosphorothioate
  modified_base 129: mod_base = OTHER; note = 2'O-methyl cytidine phosphorothioate
  modified_base 130: mod_base = OTHER; note = 2'O-methyl guanosine phosphorothioate
  modified_base 131: mod_base = OTHER; note = 2'O-methyl guanosine
ccaggccgtgcataaggctggttttagagctagaaatagcaagttaaaataaggctagtccgttatcaacttgaaaaagtggcaccgagtcggtgctttctcgtcgatggtcagcacagccttatgcacgg

SEQ ID NO: 24775 - RNA, 130 nt, synthetic construct
  source 1..130: mol_type = other RNA
  modified_base 1: mod_base = OTHER; note = 2'O-methyl cytidine phosphorothioate
  modified_base 2: mod_base = OTHER; note = 2'O-methyl cytidine phosphorothioate
  modified_base 3: mod_base = OTHER; note = 2'O-methyl adenosine phosphorothioate
  modified_base 127: mod_base = OTHER; note = cytidine phosphorothioate
  modified_base 128: mod_base = OTHER; note = 2'O-methyl adenosine phosphorothioate
  modified_base 129: mod_base = OTHER; note = 2'O-methyl cytidine phosphorothioate
  modified_base 130: mod_base = OTHER; note = 2'O-methyl guanosine
ccaggccgtgcataaggctggttttagagctagaaatagcaagttaaaataaggctagtccgttatcaacttgaaaaagtggcaccgagtcggtgctttctcgtcgatggtcagcacagccttatgcacg

SEQ ID NO: 24776 - RNA, 129 nt, synthetic construct
  source 1..129: mol_type = other RNA
  modified_base 1: mod_base = OTHER; note = 2'O-methyl cytidine phosphorothioate
  modified_base 2: mod_base = OTHER; note = 2'O-methyl cytidine phosphorothioate
  modified_base 3: mod_base = OTHER; note = 2'O-methyl adenosine phosphorothioate
  modified_base 126: mod_base = OTHER; note = guanosine phosphorothioate
  modified_base 127: mod_base = OTHER; note = 2'O-methyl cytidine phosphorothioate
  modified_base 128: mod_base = OTHER; note = 2'O-methyl adenosine phosphorothioate
  modified_base 129: mod_base = OTHER; note = 2'O-methyl cytidine
ccaggccgtgcataaggctggttttagagctagaaatagcaagttaaaataaggctagtccgttatcaacttgaaaaagtggcaccgagtcggtgctttctcgtcgatggtcagcacagccttatgcac

SEQ ID NO: 24777 - RNA, 128 nt, synthetic construct
  source 1..128: mol_type = other RNA
  modified_base 1: mod_base = OTHER; note = 2'O-methyl cytidine phosphorothioate
  modified_base 2: mod_base = OTHER; note = 2'O-methyl cytidine phosphorothioate
  modified_base 3: mod_base = OTHER; note = 2'O-methyl adenosine phosphorothioate
  modified_base 125: mod_base = OTHER; note = uridine phosphorothioate
  modified_base 126: mod_base = OTHER; note = 2'O-methyl guanosine phosphorothioate
  modified_base 127: mod_base = OTHER; note = 2'O-methyl cytidine phosphorothioate
  modified_base 128: mod_base = OTHER; note = 2'O-methyl adenosine
ccaggccgtgcataaggctggttttagagctagaaatagcaagttaaaataaggctagtccgttatcaacttgaaaaagtggcaccgagtcggtgctttctcgtcgatggtcagcacagccttatgca

SEQ ID NO: 24778 - RNA, 127 nt, synthetic construct
  source 1..127: mol_type = other RNA
  modified_base 1: mod_base = OTHER; note = 2'O-methyl cytidine phosphorothioate
  modified_base 2: mod_base = OTHER; note = 2'O-methyl cytidine phosphorothioate
  modified_base 3: mod_base = OTHER; note = 2'O-methyl adenosine phosphorothioate
  modified_base 124: mod_base = OTHER; note = adenosine phosphorothioate
  modified_base 125: mod_base = OTHER; note = 2'O-methyl uridine phosphorothioate
  modified_base 126: mod_base = OTHER; note = 2'O-methyl guanosine phosphorothioate
  modified_base 127: mod_base = OTHER; note = 2'O-methyl cytidine
ccaggccgtgcataaggctggttttagagctagaaatagcaagttaaaataaggctagtccgttatcaacttgaaaaagtggcaccgagtcggtgctttctcgtcgatggtcagcacagccttatgc

SEQ ID NO: 24779 - RNA, 134 nt, synthetic construct
  source 1..134: mol_type = other RNA
  modified_base 1: mod_base = OTHER; note = 2'O-methyl cytidine phosphorothioate
  modified_base 2: mod_base = OTHER; note = 2'O-methyl cytidine phosphorothioate
  modified_base 3: mod_base = OTHER; note = 2'O-methyl adenosine phosphorothioate
  modified_base 131: mod_base = OTHER; note = cytidine phosphorothioate
  modified_base 132: mod_base = OTHER; note = 2'O-methyl uridine phosphorothioate
  modified_base 133: mod_base = OTHER; note = 2'O-methyl guanosine phosphorothioate
  modified_base 134: mod_base = OTHER; note = 2'O-methyl guanosine
ccaggccgtgcataaggctggttttagagctagaaatagcaagttaaaataaggctagtccgttatcaacttgaaaaagtggcaccgagtcggtgctctcgtcgatggtcagcacagccttatgcacggcctgg

SEQ ID NO: 24780 - RNA, 133 nt, synthetic construct
  source 1..133: mol_type = other RNA
  modified_base 1: mod_base = OTHER; note = 2'O-methyl cytidine phosphorothioate
  modified_base 2: mod_base = OTHER; note = 2'O-methyl cytidine phosphorothioate
  modified_base 3: mod_base = OTHER; note = 2'O-methyl adenosine phosphorothioate
  modified_base 130: mod_base = OTHER; note = cytidine phosphorothioate
  modified_base 131: mod_base = OTHER; note = 2'O-methyl cytidine phosphorothioate
  modified_base 132: mod_base = OTHER; note = 2'O-methyl uridine phosphorothioate
  modified_base 133: mod_base = OTHER; note = 2'O-methyl guanosine
ccaggccgtgcataaggctggttttagagctagaaatagcaagttaaaataaggctagtccgttatcaacttgaaaaagtggcaccgagtcggtgctctcgtcgatggtcagcacagccttatgcacggcctg

SEQ ID NO: 24781 - RNA, 132 nt, synthetic construct
  source 1..132: mol_type = other RNA
  modified_base 1: mod_base = OTHER; note = 2'O-methyl cytidine phosphorothioate
  modified_base 2: mod_base = OTHER; note = 2'O-methyl cytidine phosphorothioate
  modified_base 3: mod_base = OTHER; note = 2'O-methyl adenosine phosphorothioate
  modified_base 129: mod_base = OTHER; note = guanosine phosphorothioate
  modified_base 130: mod_base = OTHER; note = 2'O-methyl cytidine phosphorothioate
  modified_base 131: mod_base = OTHER; note = 2'O-methyl cytidine phosphorothioate
  modified_base 132: mod_base = OTHER; note = 2'O-methyl uridine
ccaggccgtgcataaggctggttttagagctagaaatagcaagttaaaataaggctagtccgttatcaacttgaaaaagtggcaccgagtcggtgctctcgtcgatggtcagcacagccttatgcacggcct

SEQ ID NO: 24782 - RNA, 131 nt, synthetic construct
  source 1..131: mol_type = other RNA
  modified_base 1: mod_base = OTHER; note = 2'O-methyl cytidine phosphorothioate
  modified_base 2: mod_base = OTHER; note = 2'O-methyl cytidine phosphorothioate
  modified_base 3: mod_base = OTHER; note = 2'O-methyl adenosine phosphorothioate
  modified_base 128: mod_base = OTHER; note = guanosine phosphorothioate
  modified_base 129: mod_base = OTHER; note = 2'O-methyl guanosine phosphorothioate
  modified_base 130: mod_base = OTHER; note = 2'O-methyl cytidine phosphorothioate
  modified_base 131: mod_base = OTHER; note = 2'O-methyl cytidine
ccaggccgtgcataaggctggttttagagctagaaatagcaagttaaaataaggctagtccgttatcaacttgaaaaagtggcaccgagtcggtgctctcgtcgatggtcagcacagccttatgcacggcc

SEQ ID NO: 24783 - RNA, 130 nt, synthetic construct
  source 1..130: mol_type = other RNA
  modified_base 1: mod_base = OTHER; note = 2'O-methyl cytidine phosphorothioate
  modified_base 2: mod_base = OTHER; note = 2'O-methyl cytidine phosphorothioate
  modified_base 3: mod_base = OTHER; note = 2'O-methyl adenosine phosphorothioate
  modified_base 127: mod_base = OTHER; note = cytidine phosphorothioate
  modified_base 128: mod_base = OTHER; note = 2'O-methyl guanosine phosphorothioate
  modified_base 129: mod_base = OTHER; note = 2'O-methyl guanosine phosphorothioate
  modified_base 130: mod_base = OTHER; note = 2'O-methyl cytidine
ccaggccgtgcataaggctggttttagagctagaaatagcaagttaaaataaggctagtccgttatcaacttgaaaaagtggcaccgagtcggtgctctcgtcgatggtcagcacagccttatgcacggc

SEQ ID NO: 24784 - RNA, 129 nt, synthetic construct
  source 1..129: mol_type = other RNA
  modified_base 1: mod_base = OTHER; note = 2'O-methyl cytidine phosphorothioate
  modified_base 2: mod_base = OTHER; note = 2'O-methyl cytidine phosphorothioate
  modified_base 3: mod_base = OTHER; note = 2'O-methyl adenosine phosphorothioate
  modified_base 126: mod_base = OTHER; note = adenosine phosphorothioate
  modified_base 127: mod_base = OTHER; note = 2'O-methyl cytidine phosphorothioate
  modified_base 128: mod_base = OTHER; note = 2'O-methyl guanosine phosphorothioate
  modified_base 129: mod_base = OTHER; note = 2'O-methyl guanosine
ccaggccgtgcataaggctggttttagagctagaaatagcaagttaaaataaggctagtccgttatcaacttgaaaaagtggcaccgagtcggtgctctcgtcgatggtcagcacagccttatgcacgg

SEQ ID NO: 24785 - RNA, 128 nt, synthetic construct
  source 1..128: mol_type = other RNA
  modified_base 1: mod_base = OTHER; note = 2'O-methyl cytidine phosphorothioate
  modified_base 2: mod_base = OTHER; note = 2'O-methyl cytidine phosphorothioate
  modified_base 3: mod_base = OTHER; note = 2'O-methyl adenosine phosphorothioate
  modified_base 125: mod_base = OTHER; note = cytidine phosphorothioate
  modified_base 126: mod_base = OTHER; note = 2'O-methyl adenosine phosphorothioate
  modified_base 127: mod_base = OTHER; note = 2'O-methyl cytidine phosphorothioate
  modified_base 128: mod_base = OTHER; note = 2'O-methyl guanosine
ccaggccgtgcataaggctggttttagagctagaaatagcaagttaaaataaggctagtccgttatcaacttgaaaaagtggcaccgagtcggtgctctcgtcgatggtcagcacagccttatgcacg

SEQ ID NO: 24786 - RNA, 127 nt, synthetic construct
  source 1..127: mol_type = other RNA
  modified_base 1: mod_base = OTHER; note = 2'O-methyl cytidine phosphorothioate
  modified_base 2: mod_base = OTHER; note = 2'O-methyl cytidine phosphorothioate
  modified_base 3: mod_base = OTHER; note = 2'O-methyl adenosine phosphorothioate
  modified_base 124: mod_base = OTHER; note = guanosine phosphorothioate
  modified_base 125: mod_base = OTHER; note = 2'O-methyl cytidine phosphorothioate
  modified_base 126: mod_base = OTHER; note = 2'O-methyl adenosine phosphorothioate
  modified_base 127: mod_base = OTHER; note = 2'O-methyl cytidine
ccaggccgtgcataaggctggttttagagctagaaatagcaagttaaaataaggctagtccgttatcaacttgaaaaagtggcaccgagtcggtgctctcgtcgatggtcagcacagccttatgcac

SEQ ID NO: 24787 - RNA, 126 nt, synthetic construct
  source 1..126: mol_type = other RNA
  modified_base 1: mod_base = OTHER; note = 2'O-methyl cytidine phosphorothioate
  modified_base 2: mod_base = OTHER; note = 2'O-methyl cytidine phosphorothioate
  modified_base 3: mod_base = OTHER; note = 2'O-methyl adenosine phosphorothioate
  modified_base 123: mod_base = OTHER; note = uridine phosphorothioate
  modified_base 124: mod_base = OTHER; note = 2'O-methyl guanosine phosphorothioate
  modified_base 125: mod_base = OTHER; note = 2'O-methyl cytidine phosphorothioate
  modified_base 126: mod_base = OTHER; note = 2'O-methyl adenosine
ccaggccgtgcataaggctggttttagagctagaaatagcaagttaaaataaggctagtccgttatcaacttgaaaaagtggcaccgagtcggtgctctcgtcgatggtcagcacagccttatgca

SEQ ID NO: 24788 - RNA, 125 nt, synthetic construct
  source 1..125: mol_type = other RNA
  modified_base 1: mod_base = OTHER; note = 2'O-methyl cytidine phosphorothioate
  modified_base 2: mod_base = OTHER; note = 2'O-methyl cytidine phosphorothioate
  modified_base 3: mod_base = OTHER; note = 2'O-methyl adenosine phosphorothioate
  modified_base 122: mod_base = OTHER; note = adenosine phosphorothioate
  modified_base 123: mod_base = OTHER; note = 2'O-methyl uridine phosphorothioate
  modified_base 124: mod_base = OTHER; note = 2'O-methyl guanosine phosphorothioate
  modified_base 125: mod_base = OTHER; note = 2'O-methyl cytidine
ccaggccgtgcataaggctggttttagagctagaaatagcaagttaaaataaggctagtccgttatcaacttgaaaaagtggcaccgagtcggtgctctcgtcgatggtcagcacagccttatgc

SEQ ID NO: 24789 - RNA, 162 nt, synthetic construct
  source 1..162: mol_type = other RNA
  modified_base 1: mod_base = OTHER; note = 2'O-methyl uridine phosphorothioate
  modified_base 2: mod_base = OTHER; note = 2'O-methyl cytidine phosphorothioate
  modified_base 3: mod_base = OTHER; note = 2'O-methyl cytidine phosphorothioate
  modified_base 159: mod_base = OTHER; note = uridine phosphorothioate
  modified_base 160: mod_base = OTHER; note = 2'O-methyl guanosine phosphorothioate
  modified_base 161: mod_base = OTHER; note = 2'O-methyl guanosine phosphorothioate
  modified_base 162: mod_base = OTHER; note = 2'O-methyl adenosine
tccaggccgtgcataaggctgttttagagctagaaatagcaagttaaaataaggctagtccgttatcaacttgaaaaagtggcaccgagtcggtgcacatggccccagcagcttcagtccctttctcgtcgatggtcagcacagccttatgcacggcctgga

SEQ ID NO: 24790 - RNA, 161 nt, synthetic construct
  source 1..161: mol_type = other RNA
  modified_base 1: mod_base = OTHER; note = 2'O-methyl uridine phosphorothioate
  modified_base 2: mod_base = OTHER; note = 2'O-methyl cytidine phosphorothioate
  modified_base 3: mod_base = OTHER; note = 2'O-methyl cytidine phosphorothioate
  modified_base 158: mod_base = OTHER; note = cytidine phosphorothioate
  modified_base 159: mod_base = OTHER; note = 2'O-methyl uridine phosphorothioate
  modified_base 160: mod_base = OTHER; note = 2'O-methyl guanosine phosphorothioate
  modified_base 161: mod_base = OTHER; note = 2'O-methyl guanosine
tccaggccgtgcataaggctgttttagagctagaaatagcaagttaaaataaggctagtccgttatcaacttgaaaaagtggcaccgagtcggtgcacatggccccagcagcttcagtccctttctcgtcgatggtcagcacagccttatgcacggcctgg

SEQ ID NO: 24791 - RNA, 160 nt, synthetic construct
  source 1..160: mol_type = other RNA
  modified_base 1: mod_base = OTHER; note = 2'O-methyl uridine phosphorothioate
  modified_base 2: mod_base = OTHER; note = 2'O-methyl cytidine phosphorothioate
  modified_base 3: mod_base = OTHER; note = 2'O-methyl cytidine phosphorothioate
  modified_base 157: mod_base = OTHER; note = cytidine phosphorothioate
  modified_base 158: mod_base = OTHER; note = 2'O-methyl cytidine phosphorothioate
  modified_base 159: mod_base = OTHER; note = 2'O-methyl uridine phosphorothioate
  modified_base 160: mod_base = OTHER; note = 2'O-methyl guanosine
tccaggccgtgcataaggctgttttagagctagaaatagcaagttaaaataaggctagtccgttatcaacttgaaaaagtggcaccgagtcggtgcacatggccccagcagcttcagtccctttctcgtcgatggtcagcacagccttatgcacggcctg

SEQ ID NO: 24792 - RNA, 159 nt, synthetic construct
  source 1..159: mol_type = other RNA
  modified_base 1: mod_base = OTHER; note = 2'O-methyl uridine phosphorothioate
  modified_base 2: mod_base = OTHER; note = 2'O-methyl cytidine phosphorothioate
  modified_base 3: mod_base = OTHER; note = 2'O-methyl cytidine phosphorothioate
  modified_base 156: mod_base = OTHER; note = guanosine phosphorothioate
  modified_base 157: mod_base = OTHER; note = 2'O-methyl cytidine phosphorothioate
  modified_base 158: mod_base = OTHER; note = 2'O-methyl cytidine phosphorothioate
  modified_base 159: mod_base = OTHER; note = 2'O-methyl uridine
tccaggccgtgcataaggctgttttagagctagaaatagcaagttaaaataaggctagtccgttatcaacttgaaaaagtggcaccgagtcggtgcacatggccccagcagcttcagtccctttctcgtcgatggtcagcacagccttatgcacggcct

SEQ ID NO: 24793 - RNA, 158 nt, synthetic construct
  source 1..158: mol_type = other RNA
  modified_base 1: mod_base = OTHER; note = 2'O-methyl uridine phosphorothioate
  modified_base 2: mod_base = OTHER; note = 2'O-methyl cytidine phosphorothioate
  modified_base 3: mod_base = OTHER; note = 2'O-methyl cytidine phosphorothioate
  modified_base 155: mod_base = OTHER; note = guanosine phosphorothioate
  modified_base 156: mod_base = OTHER; note = 2'O-methyl guanosine phosphorothioate
  modified_base 157: mod_base = OTHER; note = 2'O-methyl cytidine phosphorothioate
  modified_base 158: mod_base = OTHER; note = 2'O-methyl cytidine
tccaggccgtgcataaggctgttttagagctagaaatagcaagttaaaataaggctagtccgttatcaacttgaaaaagtggcaccgagtcggtgcacatggccccagcagcttcagtccctttctcgtcgatggtcagcacagccttatgcacggcc

SEQ ID NO: 24794 - RNA, 157 nt, synthetic construct
  source 1..157: mol_type = other RNA
  modified_base 1: mod_base = OTHER; note = 2'O-methyl uridine phosphorothioate
  modified_base 2: mod_base = OTHER; note = 2'O-methyl cytidine phosphorothioate
  modified_base 3: mod_base = OTHER; note = 2'O-methyl cytidine phosphorothioate
  modified_base 154: mod_base = OTHER; note = cytidine phosphorothioate
  modified_base 155: mod_base = OTHER; note = 2'O-methyl guanosine phosphorothioate
  modified_base 156: mod_base = OTHER; note = 2'O-methyl guanosine phosphorothioate
  modified_base 157: mod_base = OTHER; note = 2'O-methyl cytidine
tccaggccgtgcataaggctgttttagagctagaaatagcaagttaaaataaggctagtccgttatcaacttgaaaaagtggcaccgagtcggtgcacatggccccagcagcttcagtccctttctcgtcgatggtcagcacagccttatgcacggc

SEQ ID NO: 24795 - RNA, 156 nt, synthetic construct
  source 1..156: mol_type = other RNA
  modified_base 1: mod_base = OTHER; note = 2'O-methyl uridine phosphorothioate
  modified_base 2: mod_base = OTHER; note = 2'O-methyl cytidine phosphorothioate
  modified_base 3: mod_base = OTHER; note = 2'O-methyl cytidine phosphorothioate
  modified_base 153: mod_base = OTHER; note = adenosine phosphorothioate
  modified_base 154: mod_base = OTHER; note = 2'O-methyl cytidine phosphorothioate
  modified_base 155: mod_base = OTHER; note = 2'O-methyl guanosine phosphorothioate
  modified_base 156: mod_base = OTHER; note = 2'O-methyl guanosine
tccaggccgtgcataaggctgttttagagctagaaatagcaagttaaaataaggctagtccgttatcaacttgaaaaagtggcaccgagtcggtgcacatggccccagcagcttcagtccctttctcgtcgatggtcagcacagccttatgcacgg

SEQ ID NO: 24796 - RNA, 155 nt, synthetic construct
  source 1..155: mol_type = other RNA
  modified_base 1: mod_base = OTHER; note = 2'O-methyl uridine phosphorothioate
  modified_base 2: mod_base = OTHER; note = 2'O-methyl cytidine phosphorothioate
  modified_base 3: mod_base = OTHER; note = 2'O-methyl cytidine phosphorothioate
  modified_base 152: mod_base = OTHER; note = cytidine phosphorothioate
  modified_base 153: mod_base = OTHER; note = 2'O-methyl adenosine phosphorothioate
  modified_base 154: mod_base = OTHER; note = 2'O-methyl cytidine phosphorothioate
  modified_base 155: mod_base = OTHER; note = 2'O-methyl guanosine
tccaggccgtgcataaggctgttttagagctagaaatagcaagttaaaataaggctagtccgttatcaacttgaaaaagtggcaccgagtcggtgcacatggccccagcagcttcagtccctttctcgtcgatggtcagcacagccttatgcacg

SEQ ID NO: 24797 - RNA, 154 nt, synthetic construct
  source 1..154: mol_type = other RNA
  modified_base 1: mod_base = OTHER; note = 2'O-methyl uridine phosphorothioate
  modified_base 2: mod_base = OTHER; note = 2'O-methyl cytidine phosphorothioate
  modified_base 3: mod_base = OTHER; note = 2'O-methyl cytidine phosphorothioate
  modified_base 151: mod_base = OTHER; note = guanosine phosphorothioate
  modified_base 152: mod_base = OTHER; note = 2'O-methyl cytidine phosphorothioate
  modified_base 153: mod_base = OTHER; note = 2'O-methyl adenosine phosphorothioate
  modified_base 154: mod_base = OTHER; note = 2'O-methyl cytidine
tccaggccgtgcataaggctgttttagagctagaaatagcaagttaaaataaggctagtccgttatcaacttgaaaaagtggcaccgagtcggtgcacatggccccagcagcttcagtccctttctcgtcgatggtcagcacagccttatgcac

SEQ ID NO: 24798 - RNA, 153 nt, synthetic construct
  source 1..153: mol_type = other RNA
  modified_base 1: mod_base = OTHER; note = 2'O-methyl uridine phosphorothioate
  modified_base 2: mod_base = OTHER; note = 2'O-methyl cytidine phosphorothioate
  modified_base 3: mod_base = OTHER; note = 2'O-methyl cytidine phosphorothioate
  modified_base 150: mod_base = OTHER; note = uridine phosphorothioate
  modified_base 151: mod_base = OTHER; note = 2'O-methyl guanosine phosphorothioate
  modified_base 152: mod_base = OTHER; note = 2'O-methyl cytidine phosphorothioate
  modified_base 153: mod_base = OTHER; note = 2'O-methyl adenosine
tccaggccgtgcataaggctgttttagagctagaaatagcaagttaaaataaggctagtccgttatcaacttgaaaaagtggcaccgagtcggtgcacatggccccagcagcttcagtccctttctcgtcgatggtcagcacagccttatgca

SEQ ID NO: 24799 - RNA, 157 nt, synthetic construct
  source 1..157: mol_type = other RNA
  modified_base 1: mod_base = OTHER; note = 2'O-methyl uridine phosphorothioate
  modified_base 2: mod_base = OTHER; note = 2'O-methyl cytidine phosphorothioate
  modified_base 3: mod_base = OTHER; note = 2'O-methyl cytidine phosphorothioate
  modified_base 154: mod_base = OTHER; note = uridine phosphorothioate
  modified_base 155: mod_base = OTHER; note = 2'O-methyl guanosine phosphorothioate
  modified_base 156: mod_base = OTHER; note = 2'O-methyl guanosine phosphorothioate
  modified_base 157: mod_base = OTHER; note = 2'O-methyl adenosine
tccaggccgtgcataaggctgttttagagctagaaatagcaagttaaaataaggctagtccgttatcaacttgaaaaagtggcaccgagtcggtgcgccccagcagcttcagtccctttctcgtcgatggtcagcacagccttatgcacggcctgga

SEQ ID NO: 24800 - RNA, 156 nt, synthetic construct
  source 1..156: mol_type = other RNA
  modified_base 1: mod_base = OTHER; note = 2'O-methyl uridine phosphorothioate
  modified_base 2: mod_base = OTHER; note = 2'O-methyl cytidine phosphorothioate
  modified_base 3: mod_base = OTHER; note = 2'O-methyl cytidine phosphorothioate
  modified_base 153: mod_base = OTHER; note = cytidine phosphorothioate
  modified_base 154: mod_base = OTHER; note = 2'O-methyl uridine phosphorothioate
  modified_base 155: mod_base = OTHER; note = 2'O-methyl guanosine phosphorothioate
  modified_base 156: mod_base = OTHER; note = 2'O-methyl guanosine
tccaggccgtgcataaggctgttttagagctagaaatagcaagttaaaataaggctagtccgttatcaacttgaaaaagtggcaccgagtcggtgcgccccagcagcttcagtccctttctcgtcgatggtcagcacagccttatgcacggcctgg

SEQ ID NO: 24801 - RNA, 155 nt, synthetic construct
  source 1..155: mol_type = other RNA
  modified_base 1: mod_base = OTHER; note = 2'O-methyl uridine phosphorothioate
  modified_base 2: mod_base = OTHER; note = 2'O-methyl cytidine phosphorothioate
  modified_base 3: mod_base = OTHER; note = 2'O-methyl cytidine phosphorothioate
  modified_base 152: mod_base = OTHER; note = cytidine phosphorothioate
  modified_base 153: mod_base = OTHER; note = 2'O-methyl cytidine phosphorothioate
  modified_base 154: mod_base = OTHER; note = 2'O-methyl uridine phosphorothioate
  modified_base 155: mod_base = OTHER; note = 2'O-methyl guanosine
tccaggccgtgcataaggctgttttagagctagaaatagcaagttaaaataaggctagtccgttatcaacttgaaaaagtggcaccgagtcggtgcgccccagcagcttcagtccctttctcgtcgatggtcagcacagccttatgcacggcctg

SEQ ID NO: 24802 - RNA, 154 nt, synthetic construct
  source 1..154: mol_type = other RNA
  modified_base 1: mod_base = OTHER; note = 2'O-methyl uridine phosphorothioate
  modified_base 2: mod_base = OTHER; note = 2'O-methyl cytidine phosphorothioate
  modified_base 3: mod_base = OTHER; note = 2'O-methyl cytidine phosphorothioate
  modified_base 151: mod_base = OTHER; note = guanosine phosphorothioate
  modified_base 152: mod_base = OTHER; note = 2'O-methyl cytidine phosphorothioate
  modified_base 153: mod_base = OTHER; note = 2'O-methyl cytidine phosphorothioate
  modified_base 154: mod_base = OTHER; note = 2'O-methyl uridine
tccaggccgtgcataaggctgttttagagctagaaatagcaagttaaaataaggctagtccgttatcaacttgaaaaagtggcaccgagtcggtgcgccccagcagcttcagtccctttctcgtcgatggtcagcacagccttatgcacggcct

SEQ ID NO: 24803 - RNA, 153 nt, synthetic construct
  source 1..153: mol_type = other RNA
  modified_base 1: mod_base = OTHER; note = 2'O-methyl uridine phosphorothioate
  modified_base 2: mod_base = OTHER; note = 2'O-methyl cytidine phosphorothioate
  modified_base 3: mod_base = OTHER; note = 2'O-methyl cytidine phosphorothioate
  modified_base 150: mod_base = OTHER; note = guanosine phosphorothioate
  modified_base 151: mod_base = OTHER; note = 2'O-methyl guanosine phosphorothioate
  modified_base 152: mod_base = OTHER; note = 2'O-methyl cytidine phosphorothioate
  modified_base 153: mod_base = OTHER; note = 2'O-methyl cytidine
tccaggccgtgcataaggctgttttagagctagaaatagcaagttaaaataaggctagtccgttatcaacttgaaaaagtggcaccgagtcggtgcgccccagcagcttcagtccctttctcgtcgatggtcagcacagccttatgcacggcc

SEQ ID NO: 24804 - RNA, 152 nt, synthetic construct
  source 1..152: mol_type = other RNA
  modified_base 1: mod_base = OTHER; note = 2'O-methyl uridine phosphorothioate
  modified_base 2: mod_base = OTHER; note = 2'O-methyl cytidine phosphorothioate
  modified_base 3: mod_base = OTHER; note = 2'O-methyl cytidine phosphorothioate
  modified_base 149: mod_base = OTHER; note = cytidine phosphorothioate
  modified_base 150: mod_base = OTHER; note = 2'O-methyl guanosine phosphorothioate
  modified_base 151: mod_base = OTHER; note = 2'O-methyl guanosine phosphorothioate
  modified_base 152: mod_base = OTHER; note = 2'O-methyl cytidine
tccaggccgtgcataaggctgttttagagctagaaatagcaagttaaaataaggctagtccgttatcaacttgaaaaagtggcaccgagtcggtgcgccccagcagcttcagtccctttctcgtcgatggtcagcacagccttatgcacggc

SEQ ID NO: 24805 - RNA, 151 nt, synthetic construct
  source 1..151: mol_type = other RNA
  modified_base 1: mod_base = OTHER; note = 2'O-methyl uridine phosphorothioate
  modified_base 2: mod_base = OTHER; note = 2'O-methyl cytidine phosphorothioate
  modified_base 3: mod_base = OTHER; note = 2'O-methyl cytidine phosphorothioate
  modified_base 148: mod_base = OTHER; note = adenosine phosphorothioate
  modified_base 149: mod_base = OTHER; note = 2'O-methyl cytidine phosphorothioate
  modified_base 150: mod_base = OTHER; note = 2'O-methyl guanosine phosphorothioate
  modified_base 151: mod_base = OTHER; note = 2'O-methyl guanosine
tccaggccgtgcataaggctgttttagagctagaaatagcaagttaaaataaggctagtccgttatcaacttgaaaaagtggcaccgagtcggtgcgccccagcagcttcagtccctttctcgtcgatggtcagcacagccttatgcacgg

SEQ ID NO: 24806 - RNA, 150 nt, synthetic construct
  source 1..150: mol_type = other RNA
  modified_base 1: mod_base = OTHER; note = 2'O-methyl uridine phosphorothioate
  modified_base 2: mod_base = OTHER; note = 2'O-methyl cytidine phosphorothioate
  modified_base 3: mod_base = OTHER; note = 2'O-methyl cytidine phosphorothioate
  modified_base 147: mod_base = OTHER; note = cytidine phosphorothioate
  modified_base 148: mod_base = OTHER; note = 2'O-methyl adenosine phosphorothioate
  modified_base 149: mod_base = OTHER; note = 2'O-methyl cytidine phosphorothioate
  modified_base 150: mod_base = OTHER; note = 2'O-methyl guanosine
tccaggccgtgcataaggctgttttagagctagaaatagcaagttaaaataaggctagtccgttatcaacttgaaaaagtggcaccgagtcggtgcgccccagcagcttcagtccctttctcgtcgatggtcagcacagccttatgcacg

SEQ ID NO: 24807 - RNA, 149 nt, synthetic construct
  source 1..149: mol_type = other RNA
  modified_base 1: mod_base = OTHER; note = 2'O-methyl uridine phosphorothioate
  modified_base 2: mod_base = OTHER; note = 2'O-methyl cytidine phosphorothioate
  modified_base 3: mod_base = OTHER; note = 2'O-methyl cytidine phosphorothioate
  modified_base 146: mod_base = OTHER; note = guanosine phosphorothioate
  modified_base 147: mod_base = OTHER; note = 2'O-methyl cytidine phosphorothioate
  modified_base 148: mod_base = OTHER; note = 2'O-methyl adenosine phosphorothioate
  modified_base 149: mod_base = OTHER; note = 2'O-methyl cytidine
tccaggccgtgcataaggctgttttagagctagaaatagcaagttaaaataaggctagtccgttatcaacttgaaaaagtggcaccgagtcggtgcgccccagcagcttcagtccctttctcgtcgatggtcagcacagccttatgcac

SEQ ID NO: 24808 - RNA, 148 nt, synthetic construct
  source 1..148: mol_type = other RNA
  modified_base 1: mod_base = OTHER; note = 2'O-methyl uridine phosphorothioate
  modified_base 2: mod_base = OTHER; note = 2'O-methyl cytidine phosphorothioate
  modified_base 3: mod_base = OTHER; note = 2'O-methyl cytidine phosphorothioate
  modified_base 145: mod_base = OTHER; note = uridine phosphorothioate
  modified_base 146: mod_base = OTHER; note = 2'O-methyl guanosine phosphorothioate
  modified_base 147: mod_base = OTHER; note = 2'O-methyl cytidine phosphorothioate
  modified_base 148: mod_base = OTHER; note = 2'O-methyl adenosine
tccaggccgtgcataaggctgttttagagctagaaatagcaagttaaaataaggctagtccgttatcaacttgaaaaagtggcaccgagtcggtgcgccccagcagcttcagtccctttctcgtcgatggtcagcacagccttatgca

SEQ ID NO: 24809 - RNA, 152 nt, synthetic construct
  source 1..152: mol_type = other RNA
  modified_base 1: mod_base = OTHER; note = 2'O-methyl uridine phosphorothioate
  modified_base 2: mod_base = OTHER; note = 2'O-methyl cytidine phosphorothioate
  modified_base 3: mod_base = OTHER; note = 2'O-methyl cytidine phosphorothioate
  modified_base 149: mod_base = OTHER; note = uridine phosphorothioate
  modified_base 150: mod_base = OTHER; note = 2'O-methyl guanosine phosphorothioate
  modified_base 151: mod_base = OTHER; note = 2'O-methyl guanosine phosphorothioate
  modified_base 152: mod_base = OTHER; note = 2'O-methyl adenosine
tccaggccgtgcataaggctgttttagagctagaaatagcaagttaaaataaggctagtccgttatcaacttgaaaaagtggcaccgagtcggtgcagcagcttcagtccctttctcgtcgatggtcagcacagccttatgcacggcctgga

SEQ ID NO: 24810 - RNA, 151 nt, synthetic construct
  source 1..151: mol_type = other RNA
  modified_base 1: mod_base = OTHER; note = 2'O-methyl uridine phosphorothioate
  modified_base 2: mod_base = OTHER; note = 2'O-methyl cytidine phosphorothioate
  modified_base 3: mod_base = OTHER; note = 2'O-methyl cytidine phosphorothioate
  modified_base 148: mod_base = OTHER; note = cytidine phosphorothioate
  modified_base 149: mod_base = OTHER; note = 2'O-methyl uridine phosphorothioate
  modified_base 150: mod_base = OTHER; note = 2'O-methyl guanosine phosphorothioate
  modified_base 151: mod_base = OTHER; note = 2'O-methyl guanosine
tccaggccgtgcataaggctgttttagagctagaaatagcaagttaaaataaggctagtccgttatcaacttgaaaaagtggcaccgagtcggtgcagcagcttcagtccctttctcgtcgatggtcagcacagccttatgcacggcctgg

SEQ ID NO: 24811 - RNA, 150 nt, synthetic construct
  source 1..150: mol_type = other RNA
  modified_base 1: mod_base = OTHER; note = 2'O-methyl uridine phosphorothioate
  modified_base 2: mod_base = OTHER; note = 2'O-methyl cytidine phosphorothioate
  modified_base 3: mod_base = OTHER; note = 2'O-methyl cytidine phosphorothioate
  modified_base 147: mod_base = OTHER; note = cytidine phosphorothioate
  modified_base 148: mod_base = OTHER; note = 2'O-methyl cytidine phosphorothioate
  modified_base 149: mod_base = OTHER; note = 2'O-methyl uridine phosphorothioate
  modified_base 150: mod_base = OTHER; note = 2'O-methyl guanosine
tccaggccgtgcataaggctgttttagagctagaaatagcaagttaaaataaggctagtccgttatcaacttgaaaaagtggcaccgagtcggtgcagcagcttcagtccctttctcgtcgatggtcagcacagccttatgcacggcctg

SEQ ID NO: 24812 - RNA, 149 nt, synthetic construct
  source 1..149: mol_type = other RNA
  modified_base 1: mod_base = OTHER; note = 2'O-methyl uridine phosphorothioate
  modified_base 2: mod_base = OTHER; note = 2'O-methyl cytidine phosphorothioate
  modified_base 3: mod_base = OTHER; note = 2'O-methyl cytidine phosphorothioate
  modified_base 146: mod_base = OTHER; note = guanosine phosphorothioate
  modified_base 147: mod_base = OTHER; note = 2'O-methyl cytidine phosphorothioate
  modified_base 148: mod_base = OTHER; note = 2'O-methyl cytidine phosphorothioate
  modified_base 149: mod_base = OTHER; note = 2'O-methyl uridine
tccaggccgtgcataaggctgttttagagctagaaatagcaagttaaaataaggctagtccgttatcaacttgaaaaagtggcaccgagtcggtgcagcagcttcagtccctttctcgtcgatggtcagcacagccttatgcacggcct

SEQ ID NO: 24813 - RNA, 148 nt, synthetic construct
  source 1..148: mol_type = other RNA
  modified_base 1: mod_base = OTHER; note = 2'O-methyl uridine phosphorothioate
  modified_base 2: mod_base = OTHER; note = 2'O-methyl cytidine phosphorothioate
  modified_base 3: mod_base = OTHER; note = 2'O-methyl cytidine phosphorothioate
  modified_base 145: mod_base = OTHER; note = guanosine phosphorothioate
  modified_base 146: mod_base = OTHER; note = 2'O-methyl guanosine phosphorothioate
  modified_base 147: mod_base = OTHER; note = 2'O-methyl cytidine phosphorothioate
  modified_base 148: mod_base = OTHER; note = 2'O-methyl cytidine
tccaggccgtgcataaggctgttttagagctagaaatagcaagttaaaataaggctagtccgttatcaacttgaaaaagtggcaccgagtcggtgcagcagcttcagtccctttctcgtcgatggtcagcacagccttatgcacggcc

SEQ ID NO: 24814 - RNA, 147 nt, synthetic construct
  source 1..147: mol_type = other RNA
  modified_base 1: mod_base = OTHER; note = 2'O-methyl uridine phosphorothioate
  modified_base 2: mod_base = OTHER; note = 2'O-methyl cytidine phosphorothioate
  modified_base 3: mod_base = OTHER; note = 2'O-methyl cytidine phosphorothioate
  modified_base 144: mod_base = OTHER; note = cytidine phosphorothioate
  modified_base 145: mod_base = OTHER; note = 2'O-methyl guanosine phosphorothioate
  modified_base 146: mod_base = OTHER; note = 2'O-methyl guanosine phosphorothioate
  modified_base 147: mod_base = OTHER; note = 2'O-methyl cytidine
tccaggccgtgcataaggctgttttagagctagaaatagcaagttaaaataaggctagtccgttatcaacttgaaaaagtggcaccgagtcggtgcagcagcttcagtccctttctcgtcgatggtcagcacagccttatgcacggc

SEQ ID NO: 24815 - RNA, 146 nt, synthetic construct
  source 1..146: mol_type = other RNA
  modified_base 1: mod_base = OTHER; note = 2'O-methyl uridine phosphorothioate
  modified_base 2: mod_base = OTHER; note = 2'O-methyl cytidine phosphorothioate
  modified_base 3: mod_base = OTHER; note = 2'O-methyl cytidine phosphorothioate
  modified_base 143: mod_base = OTHER; note = adenosine phosphorothioate
  modified_base 144: mod_base = OTHER; note = 2'O-methyl cytidine phosphorothioate
  modified_base 145: mod_base = OTHER; note = 2'O-methyl guanosine phosphorothioate
  modified_base 146: mod_base = OTHER; note = 2'O-methyl guanosine
tccaggccgtgcataaggctgttttagagctagaaatagcaagttaaaataaggctagtccgttatcaacttgaaaaagtggcaccgagtcggtgcagcagcttcagtccctttctcgtcgatggtcagcacagccttatgcacgg

SEQ ID NO: 24816 - RNA, 145 nt, synthetic construct
  source 1..145: mol_type = other RNA
  modified_base 1: mod_base = OTHER; note = 2'O-methyl uridine phosphorothioate
  modified_base 2: mod_base = OTHER; note = 2'O-methyl cytidine phosphorothioate
  modified_base 3: mod_base = OTHER; note = 2'O-methyl cytidine phosphorothioate
  modified_base 142: mod_base = OTHER; note = cytidine phosphorothioate
  modified_base 143: mod_base = OTHER; note = 2'O-methyl adenosine phosphorothioate
  modified_base 144: mod_base = OTHER; note = 2'O-methyl cytidine phosphorothioate
  modified_base 145: mod_base = OTHER; note = 2'O-methyl guanosine
tccaggccgtgcataaggctgttttagagctagaaatagcaagttaaaataaggctagtccgttatcaacttgaaaaagtggcaccgagtcggtgcagcagcttcagtccctttctcgtcgatggtcagcacagccttatgcacg

SEQ ID NO: 24817 - RNA, 144 nt, synthetic construct
  source 1..144: mol_type = other RNA
  modified_base 1: mod_base = OTHER; note = 2'O-methyl uridine phosphorothioate
  modified_base 2: mod_base = OTHER; note = 2'O-methyl cytidine phosphorothioate
  modified_base 3: mod_base = OTHER; note = 2'O-methyl cytidine phosphorothioate
  modified_base 141: mod_base = OTHER; note = guanosine phosphorothioate
  modified_base 142: mod_base = OTHER; note = 2'O-methyl cytidine phosphorothioate
  modified_base 143: mod_base = OTHER; note = 2'O-methyl adenosine phosphorothioate
  modified_base 144: mod_base = OTHER; note = 2'O-methyl cytidine
tccaggccgtgcataaggctgttttagagctagaaatagcaagttaaaataaggctagtccgttatcaacttgaaaaagtggcaccgagtcggtgcagcagcttcagtccctttctcgtcgatggtcagcacagccttatgcac

SEQ ID NO: 24818 - RNA, 143 nt, synthetic construct
  source 1..143: mol_type = other RNA
  modified_base 1: mod_base = OTHER; note = 2'O-methyl uridine phosphorothioate
  modified_base 2: mod_base = OTHER; note = 2'O-methyl cytidine phosphorothioate
  modified_base 3: mod_base = OTHER; note = 2'O-methyl cytidine phosphorothioate
  modified_base 140: mod_base = OTHER; note = uridine phosphorothioate
  modified_base 141: mod_base = OTHER; note = 2'O-methyl guanosine phosphorothioate
  modified_base 142: mod_base = OTHER; note = 2'O-methyl cytidine phosphorothioate
  modified_base 143: mod_base = OTHER; note = 2'O-methyl adenosine
tccaggccgtgcataaggctgttttagagctagaaatagcaagttaaaataaggctagtccgttatcaacttgaaaaagtggcaccgagtcggtgcagcagcttcagtccctttctcgtcgatggtcagcacagccttatgca

SEQ ID NO: 24819 - RNA, 146 nt, synthetic construct
  source 1..146: mol_type = other RNA
  modified_base 1: mod_base = OTHER; note = 2'O-methyl uridine phosphorothioate
  modified_base 2: mod_base = OTHER; note = 2'O-methyl cytidine phosphorothioate
  modified_base 3: mod_base = OTHER; note = 2'O-methyl cytidine phosphorothioate
  modified_base 143: mod_base = OTHER; note = uridine phosphorothioate
  modified_base 144: mod_base = OTHER; note = 2'O-methyl guanosine phosphorothioate
  modified_base 145: mod_base = OTHER; note = 2'O-methyl guanosine phosphorothioate
  modified_base 146: mod_base = OTHER; note = 2'O-methyl adenosine
tccaggccgtgcataaggctgttttagagctagaaatagcaagttaaaataaggctagtccgttatcaacttgaaaaagtggcaccgagtcggtgcttcagtccctttctcgtcgatggtcagcacagccttatgcacggcctgga

SEQ ID NO: 24820 - RNA, 145 nt, synthetic construct
  source 1..145: mol_type = other RNA
  modified_base 1: mod_base = OTHER; note = 2'O-methyl uridine phosphorothioate
  modified_base 2: mod_base = OTHER; note = 2'O-methyl cytidine phosphorothioate
  modified_base 3: mod_base = OTHER; note = 2'O-methyl cytidine phosphorothioate
  modified_base 142: mod_base = OTHER; note = cytidine phosphorothioate
  modified_base 143: mod_base = OTHER; note = 2'O-methyl uridine phosphorothioate
  modified_base 144: mod_base = OTHER; note = 2'O-methyl guanosine phosphorothioate
  modified_base 145: mod_base = OTHER; note = 2'O-methyl guanosine
tccaggccgtgcataaggctgttttagagctagaaatagcaagttaaaataaggctagtccgttatcaacttgaaaaagtggcaccgagtcggtgcttcagtccctttctcgtcgatggtcagcacagccttatgcacggcctgg

SEQ ID NO: 24821 - RNA, 144 nt, synthetic construct
  source 1..144: mol_type = other RNA
  modified_base 1: mod_base = OTHER; note = 2'O-methyl uridine phosphorothioate
  modified_base 2: mod_base = OTHER; note = 2'O-methyl cytidine phosphorothioate
  modified_base 3: mod_base = OTHER; note = 2'O-methyl cytidine phosphorothioate
  modified_base 141: mod_base = OTHER; note = cytidine phosphorothioate
  modified_base 142: mod_base = OTHER; note = 2'O-methyl cytidine phosphorothioate
  modified_base 143: mod_base = OTHER; note = 2'O-methyl uridine phosphorothioate
  modified_base 144: mod_base = OTHER; note = 2'O-methyl guanosine
tccaggccgtgcataaggctgttttagagctagaaatagcaagttaaaataaggctagtccgttatcaacttgaaaaagtggcaccgagtcggtgcttcagtccctttctcgtcgatggtcagcacagccttatgcacggcctg

SEQ ID NO: 24822 - RNA, 143 nt, synthetic construct
  source 1..143: mol_type = other RNA
  modified_base 1: mod_base = OTHER; note = 2'O-methyl uridine phosphorothioate
  modified_base 2: mod_base = OTHER; note = 2'O-methyl cytidine phosphorothioate
  modified_base 3: mod_base = OTHER; note = 2'O-methyl cytidine phosphorothioate
  modified_base 140: mod_base = OTHER; note = guanosine phosphorothioate
  modified_base 141: mod_base = OTHER; note = 2'O-methyl cytidine phosphorothioate
  modified_base 142: mod_base = OTHER; note = 2'O-methyl cytidine phosphorothioate
  modified_base 143: mod_base = OTHER; note = 2'O-methyl uridine
tccaggccgtgcataaggctgttttagagctagaaatagcaagttaaaataaggctagtccgttatcaacttgaaaaagtggcaccgagtcggtgcttcagtccctttctcgtcgatggtcagcacagccttatgcacggcct

SEQ ID NO: 24823 - RNA, 142 nt, synthetic construct
  source 1..142: mol_type = other RNA
  modified_base 1: mod_base = OTHER; note = 2'O-methyl uridine phosphorothioate
  modified_base 2: mod_base = OTHER; note = 2'O-methyl cytidine phosphorothioate
  modified_base 3: mod_base = OTHER; note = 2'O-methyl cytidine phosphorothioate
  modified_base 139: mod_base = OTHER; note = guanosine phosphorothioate
  modified_base 140: mod_base = OTHER; note = 2'O-methyl guanosine phosphorothioate
  modified_base 141: mod_base = OTHER; note = 2'O-methyl cytidine phosphorothioate
  modified_base 142: mod_base = OTHER; note = 2'O-methyl cytidine
tccaggccgtgcataaggctgttttagagctagaaatagcaagttaaaataaggctagtccgttatcaacttgaaaaagtggcaccgagtcggtgcttcagtccctttctcgtcgatggtcagcacagccttatgcacggcc

SEQ ID NO: 24824 - RNA, 141 nt, synthetic construct
  source 1..141: mol_type = other RNA
  modified_base 1: mod_base = OTHER; note = 2'O-methyl uridine phosphorothioate
  modified_base 2: mod_base = OTHER; note = 2'O-methyl cytidine phosphorothioate
  modified_base 3: mod_base = OTHER; note = 2'O-methyl cytidine phosphorothioate
  modified_base 138: mod_base = OTHER; note = cytidine phosphorothioate
  modified_base 139: mod_base = OTHER; note = 2'O-methyl guanosine phosphorothioate
  modified_base 140: mod_base = OTHER; note = 2'O-methyl guanosine phosphorothioate
  modified_base 141: mod_base = OTHER; note = 2'O-methyl cytidine
tccaggccgtgcataaggctgttttagagctagaaatagcaagttaaaataaggctagtccgttatcaacttgaaaaagtggcaccgagtcggtgcttcagtccctttctcgtcgatggtcagcacagccttatgcacggc

SEQ ID NO: 24825 - RNA, 140 nt, synthetic construct
  source 1..140: mol_type = other RNA
  modified_base 1: mod_base = OTHER; note = 2'O-methyl uridine phosphorothioate
  modified_base 2: mod_base = OTHER; note = 2'O-methyl cytidine phosphorothioate
  modified_base 3: mod_base = OTHER; note = 2'O-methyl cytidine phosphorothioate
  modified_base 137: mod_base = OTHER; note = adenosine phosphorothioate
  modified_base 138: mod_base = OTHER; note = 2'O-methyl cytidine phosphorothioate
  modified_base 139: mod_base = OTHER; note = 2'O-methyl guanosine phosphorothioate
  modified_base 140: mod_base = OTHER; note = 2'O-methyl guanosine
tccaggccgtgcataaggctgttttagagctagaaatagcaagttaaaataaggctagtccgttatcaacttgaaaaagtggcaccgagtcggtgcttcagtccctttctcgtcgatggtcagcacagccttatgcacgg

SEQ ID NO: 24826 - RNA, 139 nt, synthetic construct
  source 1..139: mol_type = other RNA
  modified_base 1: mod_base = OTHER; note = 2'O-methyl uridine phosphorothioate
  modified_base 2: mod_base = OTHER; note = 2'O-methyl cytidine phosphorothioate
  modified_base 3: mod_base = OTHER; note = 2'O-methyl cytidine phosphorothioate
  modified_base 136: mod_base = OTHER; note = cytidine phosphorothioate
  modified_base 137: mod_base = OTHER; note = 2'O-methyl adenosine phosphorothioate
  modified_base 138: mod_base = OTHER; note = 2'O-methyl cytidine phosphorothioate
  modified_base 139: mod_base = OTHER; note = 2'O-methyl guanosine
tccaggccgtgcataaggctgttttagagctagaaatagcaagttaaaataaggctagtccgttatcaacttgaaaaagtggcaccgagtcggtgcttcagtccctttctcgtcgatggtcagcacagccttatgcacg

SEQ ID NO: 24827 - RNA, 138 nt, synthetic construct
  source 1..138: mol_type = other RNA
  modified_base 1: mod_base = OTHER; note = 2'O-methyl uridine phosphorothioate
  modified_base 2: mod_base = OTHER; note = 2'O-methyl cytidine phosphorothioate
  modified_base 3: mod_base = OTHER; note = 2'O-methyl cytidine phosphorothioate
  modified_base 135: mod_base = OTHER; note = guanosine phosphorothioate
  modified_base 136: mod_base = OTHER; note = 2'O-methyl cytidine phosphorothioate
  modified_base 137: mod_base = OTHER; note = 2'O-methyl adenosine phosphorothioate
  modified_base 138: mod_base = OTHER; note = 2'O-methyl cytidine
tccaggccgtgcataaggctgttttagagctagaaatagcaagttaaaataaggctagtccgttatcaacttgaaaaagtggcaccgagtcggtgcttcagtccctttctcgtcgatggtcagcacagccttatgcac

SEQ ID NO: 24828 - RNA, 137 nt, synthetic construct
  source 1..137: mol_type = other RNA
  modified_base 1: mod_base = OTHER; note = 2'O-methyl uridine phosphorothioate
  modified_base 2: mod_base = OTHER; note = 2'O-methyl cytidine phosphorothioate
  modified_base 3: mod_base = OTHER; note = 2'O-methyl cytidine phosphorothioate
  modified_base 134: mod_base = OTHER; note = uridine phosphorothioate
  modified_base 135: mod_base = OTHER; note = 2'O-methyl guanosine phosphorothioate
  modified_base 136: mod_base = OTHER; note = 2'O-methyl cytidine phosphorothioate
  modified_base 137: mod_base = OTHER; note = 2'O-methyl adenosine
tccaggccgtgcataaggctgttttagagctagaaatagcaagttaaaataaggctagtccgttatcaacttgaaaaagtggcaccgagtcggtgcttcagtccctttctcgtcgatggtcagcacagccttatgca

SEQ ID NO: 24829 - RNA, 143 nt, synthetic construct
  source 1..143: mol_type = other RNA
  modified_base 1: mod_base = OTHER; note = 2'O-methyl uridine phosphorothioate
  modified_base 2: mod_base = OTHER; note = 2'O-methyl cytidine phosphorothioate
  modified_base 3: mod_base = OTHER; note = 2'O-methyl cytidine phosphorothioate
  modified_base 140: mod_base = OTHER; note = uridine phosphorothioate
  modified_base 141: mod_base = OTHER; note = 2'O-methyl guanosine phosphorothioate
  modified_base 142: mod_base = OTHER; note = 2'O-methyl guanosine phosphorothioate
  modified_base 143: mod_base = OTHER; note = 2'O-methyl adenosine
tccaggccgtgcataaggctgttttagagctagaaatagcaagttaaaataaggctagtccgttatcaacttgaaaaagtggcaccgagtcggtgcagtccctttctcgtcgatggtcagcacagccttatgcacggcctgga

SEQ ID NO: 24830 - RNA, 142 nt, synthetic construct
  source 1..142: mol_type = other RNA
  modified_base 1: mod_base = OTHER; note = 2'O-methyl uridine phosphorothioate
  modified_base 2: mod_base = OTHER; note = 2'O-methyl cytidine phosphorothioate
  modified_base 3: mod_base = OTHER; note = 2'O-methyl cytidine phosphorothioate
  modified_base 139: mod_base = OTHER; note = cytidine phosphorothioate
  modified_base 140: mod_base = OTHER; note = 2'O-methyl uridine phosphorothioate
  modified_base 141: mod_base = OTHER; note = 2'O-methyl guanosine phosphorothioate
  modified_base 142: mod_base = OTHER; note = 2'O-methyl guanosine
tccaggccgtgcataaggctgttttagagctagaaatagcaagttaaaataaggctagtccgttatcaacttgaaaaagtggcaccgagtcggtgcagtccctttctcgtcgatggtcagcacagccttatgcacggcctgg

SEQ ID NO: 24831 - RNA, 141 nt, synthetic construct
  source 1..141: mol_type = other RNA
  modified_base 1: mod_base = OTHER; note = 2'O-methyl uridine phosphorothioate
  modified_base 2: mod_base = OTHER; note = 2'O-methyl cytidine phosphorothioate
  modified_base 3: mod_base = OTHER; note = 2'O-methyl cytidine phosphorothioate
  modified_base 138: mod_base = OTHER; note = cytidine phosphorothioate
  modified_base 139: mod_base = OTHER; note = 2'O-methyl cytidine phosphorothioate
  modified_base 140: mod_base = OTHER; note = 2'O-methyl uridine phosphorothioate
  modified_base 141: mod_base = OTHER; note = 2'O-methyl guanosine
tccaggccgtgcataaggctgttttagagctagaaatagcaagttaaaataaggctagtccgttatcaacttgaaaaagtggcaccgagtcggtgcagtccctttctcgtcgatggtcagcacagccttatgcacggcctg

SEQ ID NO: 24832 - RNA, 140 nt, synthetic construct
  source 1..140: mol_type = other RNA
  modified_base 1: mod_base = OTHER; note = 2'O-methyl uridine phosphorothioate
  modified_base 2: mod_base = OTHER; note = 2'O-methyl cytidine phosphorothioate
  modified_base 3: mod_base = OTHER; note = 2'O-methyl cytidine phosphorothioate
  modified_base 137: mod_base = OTHER; note = guanosine phosphorothioate
  modified_base 138: mod_base = OTHER; note = 2'O-methyl cytidine phosphorothioate
  modified_base 139: mod_base = OTHER; note = 2'O-methyl cytidine phosphorothioate
  modified_base 140: mod_base = OTHER; note = 2'O-methyl uridine
tccaggccgtgcataaggctgttttagagctagaaatagcaagttaaaataaggctagtccgttatcaacttgaaaaagtggcaccgagtcggtgcagtccctttctcgtcgatggtcagcacagccttatgcacggcct

SEQ ID NO: 24833 - RNA, 139 nt, synthetic construct
  source 1..139: mol_type = other RNA
  modified_base 1: mod_base = OTHER; note = 2'O-methyl uridine phosphorothioate
  modified_base 2: mod_base = OTHER; note = 2'O-methyl cytidine phosphorothioate
  modified_base 3: mod_base = OTHER; note = 2'O-methyl cytidine phosphorothioate
  modified_base 136: mod_base = OTHER; note = guanosine phosphorothioate
  modified_base 137: mod_base = OTHER; note = 2'O-methyl guanosine phosphorothioate
  modified_base 138: mod_base = OTHER; note = 2'O-methyl cytidine phosphorothioate
  modified_base 139: mod_base = OTHER; note = 2'O-methyl cytidine
tccaggccgtgcataaggctgttttagagctagaaatagcaagttaaaataaggctagtccgttatcaacttgaaaaagtggcaccgagtcggtgcagtccctttctcgtcgatggtcagcacagccttatgcacggcc

SEQ ID NO: 24834 - RNA, 138 nt, synthetic construct
  source 1..138: mol_type = other RNA
  modified_base 1: mod_base = OTHER; note = 2'O-methyl uridine phosphorothioate
  modified_base 2: mod_base = OTHER; note = 2'O-methyl cytidine phosphorothioate
  modified_base 3: mod_base = OTHER; note = 2'O-methyl cytidine phosphorothioate
  modified_base 135: mod_base = OTHER; note = cytidine phosphorothioate
  modified_base 136: mod_base = OTHER; note = 2'O-methyl guanosine phosphorothioate
  modified_base 137: mod_base = OTHER; note = 2'O-methyl guanosine phosphorothioate
  modified_base 138: mod_base = OTHER; note = 2'O-methyl cytidine
tccaggccgtgcataaggctgttttagagctagaaatagcaagttaaaataaggctagtccgttatcaacttgaaaaagtggcaccgagtcggtgcagtccctttctcgtcgatggtcagcacagccttatgcacggc

SEQ ID NO: 24835 - RNA, 137 nt, synthetic construct
  source 1..137: mol_type = other RNA
  modified_base 1: mod_base = OTHER; note = 2'O-methyl uridine phosphorothioate
  modified_base 2: mod_base = OTHER; note = 2'O-methyl cytidine phosphorothioate
  modified_base 3: mod_base = OTHER; note = 2'O-methyl cytidine phosphorothioate
  modified_base 134: mod_base = OTHER; note = adenosine phosphorothioate
  modified_base 135: mod_base = OTHER; note = 2'O-methyl cytidine phosphorothioate
  modified_base 136: mod_base = OTHER; note = 2'O-methyl guanosine phosphorothioate
  modified_base 137: mod_base = OTHER; note = 2'O-methyl guanosine
tccaggccgtgcataaggctgttttagagctagaaatagcaagttaaaataaggctagtccgttatcaacttgaaaaagtggcaccgagtcggtgcagtccctttctcgtcgatggtcagcacagccttatgcacgg

SEQ ID NO: 24836 - RNA, 136 nt, synthetic construct
  source 1..136: mol_type = other RNA
  modified_base 1: mod_base = OTHER; note = 2'O-methyl uridine phosphorothioate
  modified_base 2: mod_base = OTHER; note = 2'O-methyl cytidine phosphorothioate
  modified_base 3: mod_base = OTHER; note = 2'O-methyl cytidine phosphorothioate
  modified_base 133: mod_base = OTHER; note = cytidine phosphorothioate
  modified_base 134: mod_base = OTHER; note = 2'O-methyl adenosine phosphorothioate
  modified_base 135: mod_base = OTHER; note = 2'O-methyl cytidine phosphorothioate
  modified_base 136: mod_base = OTHER; note = 2'O-methyl guanosine
tccaggccgtgcataaggctgttttagagctagaaatagcaagttaaaataaggctagtccgttatcaacttgaaaaagtggcaccgagtcggtgcagtccctttctcgtcgatggtcagcacagccttatgcacg

SEQ ID NO: 24837 - RNA, 135 nt, synthetic construct
  source 1..135: mol_type = other RNA
  modified_base 1: mod_base = OTHER; note = 2'O-methyl uridine phosphorothioate
  modified_base 2: mod_base = OTHER; note = 2'O-methyl cytidine phosphorothioate
  modified_base 3: mod_base = OTHER; note = 2'O-methyl cytidine phosphorothioate
  modified_base 132: mod_base = OTHER; note = guanosine phosphorothioate
  modified_base 133: mod_base = OTHER; note = 2'O-methyl cytidine phosphorothioate
  modified_base 134: mod_base = OTHER; note = 2'O-methyl adenosine phosphorothioate
  modified_base 135: mod_base = OTHER; note = 2'O-methyl cytidine
tccaggccgtgcataaggctgttttagagctagaaatagcaagttaaaataaggctagtccgttatcaacttgaaaaagtggcaccgagtcggtgcagtccctttctcgtcgatggtcagcacagccttatgcac

SEQ ID NO: 24838 - RNA, 134 nt, synthetic construct
  source 1..134: mol_type = other RNA
  modified_base 1: mod_base = OTHER; note = 2'O-methyl uridine phosphorothioate
  modified_base 2: mod_base = OTHER; note = 2'O-methyl cytidine phosphorothioate
  modified_base 3: mod_base = OTHER; note = 2'O-methyl cytidine phosphorothioate
  modified_base 131: mod_base = OTHER; note = uridine phosphorothioate
  modified_base 132: mod_base = OTHER; note = 2'O-methyl guanosine phosphorothioate
  modified_base 133: mod_base = OTHER; note = 2'O-methyl cytidine phosphorothioate
  modified_base 134: mod_base = OTHER; note = 2'O-methyl adenosine
tccaggccgtgcataaggctgttttagagctagaaatagcaagttaaaataaggctagtccgttatcaacttgaaaaagtggcaccgagtcggtgcagtccctttctcgtcgatggtcagcacagccttatgca

SEQ ID NO: 24839 - RNA, 141 nt, synthetic construct
  source 1..141: mol_type = other RNA
  modified_base 1: mod_base = OTHER; note = 2'O-methyl uridine phosphorothioate
  modified_base 2: mod_base = OTHER; note = 2'O-methyl cytidine phosphorothioate
  modified_base 3: mod_base = OTHER; note = 2'O-methyl cytidine phosphorothioate
  modified_base 138: mod_base = OTHER; note = uridine phosphorothioate
  modified_base 139: mod_base = OTHER; note = 2'O-methyl guanosine phosphorothioate
  modified_base 140: mod_base = OTHER; note = 2'O-methyl guanosine phosphorothioate
  modified_base 141: mod_base = OTHER; note = 2'O-methyl adenosine
tccaggccgtgcataaggctgttttagagctagaaatagcaagttaaaataaggctagtccgttatcaacttgaaaaagtggcaccgagtcggtgctccctttctcgtcgatggtcagcacagccttatgcacggcctgga

SEQ ID NO: 24840 - RNA, 140 nt, synthetic construct
  source 1..140: mol_type = other RNA
  modified_base 1: mod_base = OTHER; note = 2'O-methyl uridine phosphorothioate
  modified_base 2: mod_base = OTHER; note = 2'O-methyl cytidine phosphorothioate
  modified_base 3: mod_base = OTHER; note = 2'O-methyl cytidine phosphorothioate
  modified_base 137: mod_base = OTHER; note = cytidine phosphorothioate
  modified_base 138: mod_base = OTHER; note = 2'O-methyl uridine phosphorothioate
  modified_base 139: mod_base = OTHER; note = 2'O-methyl guanosine phosphorothioate
  modified_base 140: mod_base = OTHER; note = 2'O-methyl guanosine
tccaggccgtgcataaggctgttttagagctagaaatagcaagttaaaataaggctagtccgttatcaacttgaaaaagtggcaccgagtcggtgctccctttctcgtcgatggtcagcacagccttatgcacggcctgg

SEQ ID NO: 24841 - RNA, 139 nt, synthetic construct
  source 1..139: mol_type = other RNA
  modified_base 1: mod_base = OTHER; note = 2'O-methyl uridine phosphorothioate
  modified_base 2: mod_base = OTHER; note = 2'O-methyl cytidine phosphorothioate
  modified_base 3: mod_base = OTHER; note = 2'O-methyl cytidine phosphorothioate
  modified_base 136: mod_base = OTHER; note = cytidine phosphorothioate
  modified_base 137: mod_base = OTHER; note = 2'O-methyl cytidine phosphorothioate
  modified_base 138: mod_base = OTHER; note = 2'O-methyl uridine phosphorothioate
  modified_base 139: mod_base = OTHER; note = 2'O-methyl guanosine
tccaggccgtgcataaggctgttttagagctagaaatagcaagttaaaataaggctagtccgttatcaacttgaaaaagtggcaccgagtcggtgctccctttctcgtcgatggtcagcacagccttatgcacggcctg

SEQ ID NO: 24842 - RNA, 138 nt, synthetic construct
  source 1..138: mol_type = other RNA
  modified_base 1: mod_base = OTHER; note = 2'O-methyl uridine phosphorothioate
  modified_base 2: mod_base = OTHER; note = 2'O-methyl cytidine phosphorothioate
  modified_base 3: mod_base = OTHER; note = 2'O-methyl cytidine phosphorothioate
  modified_base 135: mod_base = OTHER; note = guanosine phosphorothioate
  modified_base 136: mod_base = OTHER; note = 2'O-methyl cytidine phosphorothioate
  modified_base 137: mod_base = OTHER; note = 2'O-methyl cytidine phosphorothioate
  modified_base 138: mod_base = OTHER; note = 2'O-methyl uridine
tccaggccgtgcataaggctgttttagagctagaaatagcaagttaaaataaggctagtccgttatcaacttgaaaaagtggcaccgagtcggtgctccctttctcgtcgatggtcagcacagccttatgcacggcct

SEQ ID NO: 24843 - RNA, 137 nt, synthetic construct
  source 1..137: mol_type = other RNA
  modified_base 1: mod_base = OTHER; note = 2'O-methyl uridine phosphorothioate
  modified_base 2: mod_base = OTHER; note = 2'O-methyl cytidine phosphorothioate
  modified_base 3: mod_base = OTHER; note = 2'O-methyl cytidine phosphorothioate
  modified_base 134: mod_base = OTHER; note = guanosine phosphorothioate
  modified_base 135: mod_base = OTHER; note = 2'O-methyl guanosine phosphorothioate
  modified_base 136: mod_base = OTHER; note = 2'O-methyl cytidine phosphorothioate
  modified_base 137: mod_base = OTHER; note = 2'O-methyl cytidine
tccaggccgtgcataaggctgttttagagctagaaatagcaagttaaaataaggctagtccgttatcaacttgaaaaagtggcaccgagtcggtgctccctttctcgtcgatggtcagcacagccttatgcacggcc

SEQ ID NO: 24844 - RNA, 136 nt, synthetic construct
  source 1..136: mol_type = other RNA
  modified_base 1: mod_base = OTHER; note = 2'O-methyl uridine phosphorothioate
  modified_base 2: mod_base = OTHER; note = 2'O-methyl cytidine phosphorothioate
  modified_base 3: mod_base = OTHER; note = 2'O-methyl cytidine phosphorothioate
  modified_base 133: mod_base = OTHER; note = cytidine phosphorothioate
  modified_base 134: mod_base = OTHER; note = 2'O-methyl guanosine phosphorothioate
  modified_base 135: mod_base = OTHER; note = 2'O-methyl guanosine phosphorothioate
  modified_base 136: mod_base = OTHER; note = 2'O-methyl cytidine
tccaggccgtgcataaggctgttttagagctagaaatagcaagttaaaataaggctagtccgttatcaacttgaaaaagtggcaccgagtcggtgctccctttctcgtcgatggtcagcacagccttatgcacggc

SEQ ID NO: 24845 - RNA, 135 nt, synthetic construct
  source 1..135: mol_type = other RNA
  modified_base 1: mod_base = OTHER; note = 2'O-methyl uridine phosphorothioate
  modified_base 2: mod_base = OTHER; note = 2'O-methyl cytidine phosphorothioate
  modified_base 3: mod_base = OTHER; note = 2'O-methyl cytidine phosphorothioate
  modified_base 132: mod_base = OTHER; note = adenosine phosphorothioate
  modified_base 133: mod_base = OTHER; note = 2'O-methyl cytidine phosphorothioate
  modified_base 134: mod_base = OTHER; note = 2'O-methyl guanosine phosphorothioate
  modified_base 135: mod_base = OTHER; note = 2'O-methyl guanosine
tccaggccgtgcataaggctgttttagagctagaaatagcaagttaaaataaggctagtccgttatcaacttgaaaaagtggcaccgagtcggtgctccctttctcgtcgatggtcagcacagccttatgcacgg

SEQ ID NO: 24846 - RNA, 134 nt, synthetic construct
  source 1..134: mol_type = other RNA
  modified_base 1: mod_base = OTHER; note = 2'O-methyl uridine phosphorothioate
  modified_base 2: mod_base = OTHER; note = 2'O-methyl cytidine phosphorothioate
  modified_base 3: mod_base = OTHER; note = 2'O-methyl cytidine phosphorothioate
  modified_base 131: mod_base = OTHER; note = cytidine phosphorothioate
  modified_base 132: mod_base = OTHER; note = 2'O-methyl adenosine phosphorothioate
  modified_base 133: mod_base = OTHER; note = 2'O-methyl cytidine phosphorothioate
  modified_base 134: mod_base = OTHER; note = 2'O-methyl guanosine
tccaggccgtgcataaggctgttttagagctagaaatagcaagttaaaataaggctagtccgttatcaacttgaaaaagtggcaccgagtcggtgctccctttctcgtcgatggtcagcacagccttatgcacg

SEQ ID NO: 24847 - RNA, 133 nt, synthetic construct
  source 1..133: mol_type = other RNA
  modified_base 1: mod_base = OTHER; note = 2'O-methyl uridine phosphorothioate
  modified_base 2: mod_base = OTHER; note = 2'O-methyl cytidine phosphorothioate
  modified_base 3: mod_base = OTHER; note = 2'O-methyl cytidine phosphorothioate
  modified_base 130: mod_base = OTHER; note = guanosine phosphorothioate
  modified_base 131: mod_base = OTHER; note = 2'O-methyl cytidine phosphorothioate
  modified_base 132: mod_base = OTHER; note = 2'O-methyl adenosine phosphorothioate
  modified_base 133: mod_base = OTHER; note = 2'O-methyl cytidine
tccaggccgtgcataaggctgttttagagctagaaatagcaagttaaaataaggctagtccgttatcaacttgaaaaagtggcaccgagtcggtgctccctttctcgtcgatggtcagcacagccttatgcac

SEQ ID NO: 24848 - RNA, 132 nt, synthetic construct
  source 1..132: mol_type = other RNA
  modified_base 1: mod_base = OTHER; note = 2'O-methyl uridine phosphorothioate
  modified_base 2: mod_base = OTHER; note = 2'O-methyl cytidine phosphorothioate
  modified_base 3: mod_base = OTHER; note = 2'O-methyl cytidine phosphorothioate
  modified_base 129: mod_base = OTHER; note = uridine phosphorothioate
  modified_base 130: mod_base = OTHER; note = 2'O-methyl guanosine phosphorothioate
  modified_base 131: mod_base = OTHER; note = 2'O-methyl cytidine phosphorothioate
  modified_base 132: mod_base = OTHER; note = 2'O-methyl adenosine
tccaggccgtgcataaggctgttttagagctagaaatagcaagttaaaataaggctagtccgttatcaacttgaaaaagtggcaccgagtcggtgctccctttctcgtcgatggtcagcacagccttatgca

SEQ ID NO: 24849 - RNA, 139 nt, synthetic construct
  source 1..139: mol_type = other RNA
  modified_base 1: mod_base = OTHER; note = 2'O-methyl uridine phosphorothioate
  modified_base 2: mod_base = OTHER; note = 2'O-methyl cytidine phosphorothioate
  modified_base 3: mod_base = OTHER; note = 2'O-methyl cytidine phosphorothioate
  modified_base 136: mod_base = OTHER; note = uridine phosphorothioate
  modified_base 137: mod_base = OTHER; note = 2'O-methyl guanosine phosphorothioate
  modified_base 138: mod_base = OTHER; note = 2'O-methyl guanosine phosphorothioate
  modified_base 139: mod_base = OTHER; note = 2'O-methyl adenosine
tccaggccgtgcataaggctgttttagagctagaaatagcaagttaaaataaggctagtccgttatcaacttgaaaaagtggcaccgagtcggtgccctttctcgtcgatggtcagcacagccttatgcacggcctgga

SEQ ID NO: 24850 - RNA, 138 nt, synthetic construct
  source 1..138: mol_type = other RNA
  modified_base 1: mod_base = OTHER; note = 2'O-methyl uridine phosphorothioate
  modified_base 2: mod_base = OTHER; note = 2'O-methyl cytidine phosphorothioate
  modified_base 3: mod_base = OTHER; note = 2'O-methyl cytidine phosphorothioate
  modified_base 135: mod_base = OTHER; note = cytidine phosphorothioate
  modified_base 136: mod_base = OTHER; note = 2'O-methyl uridine phosphorothioate
  modified_base 137: mod_base = OTHER; note = 2'O-methyl guanosine phosphorothioate
  modified_base 138: mod_base = OTHER; note = 2'O-methyl guanosine
tccaggccgtgcataaggctgttttagagctagaaatagcaagttaaaataaggctagtccgttatcaacttgaaaaagtggcaccgagtcggtgccctttctcgtcgatggtcagcacagccttatgcacggcctgg

SEQ ID NO: 24851 - RNA, 137 nt, synthetic construct
  source 1..137: mol_type = other RNA
  modified_base 1: mod_base = OTHER; note = 2'O-methyl uridine phosphorothioate
  modified_base 2: mod_base = OTHER; note = 2'O-methyl cytidine phosphorothioate
  modified_base 3: mod_base = OTHER; note = 2'O-methyl cytidine phosphorothioate
  modified_base 134: mod_base = OTHER; note = cytidine phosphorothioate
  modified_base 135: mod_base = OTHER; note = 2'O-methyl cytidine phosphorothioate
  modified_base 136: mod_base = OTHER; note = 2'O-methyl uridine phosphorothioate
  modified_base 137: mod_base = OTHER; note = 2'O-methyl guanosine
tccaggccgtgcataaggctgttttagagctagaaatagcaagttaaaataaggctagtccgttatcaacttgaaaaagtggcaccgagtcggtgccctttctcgtcgatggtcagcacagccttatgcacggcctg

SEQ ID NO: 24852 - RNA, 136 nt, synthetic construct
  source 1..136: mol_type = other RNA
  modified_base 1: mod_base = OTHER; note = 2'O-methyl uridine phosphorothioate
  modified_base 2: mod_base = OTHER; note = 2'O-methyl cytidine phosphorothioate
  modified_base 3: mod_base = OTHER; note = 2'O-methyl cytidine phosphorothioate
  modified_base 133: mod_base = OTHER; note = guanosine phosphorothioate
  modified_base 134: mod_base = OTHER; note = 2'O-methyl cytidine phosphorothioate
  modified_base 135: mod_base = OTHER; note = 2'O-methyl cytidine phosphorothioate
  modified_base 136: mod_base = OTHER; note = 2'O-methyl uridine
tccaggccgtgcataaggctgttttagagctagaaatagcaagttaaaataaggctagtccgttatcaacttgaaaaagtggcaccgagtcggtgccctttctcgtcgatggtcagcacagccttatgcacggcct

SEQ ID NO: 24853 - RNA, 135 nt, synthetic construct
  source 1..135: mol_type = other RNA
  modified_base 1: mod_base = OTHER; note = 2'O-methyl uridine phosphorothioate
  modified_base 2: mod_base = OTHER; note = 2'O-methyl cytidine phosphorothioate
  modified_base 3: mod_base = OTHER; note = 2'O-methyl cytidine phosphorothioate
  modified_base 132: mod_base = OTHER; note = guanosine phosphorothioate
  modified_base 133: mod_base = OTHER; note = 2'O-methyl guanosine phosphorothioate
  modified_base 134: mod_base = OTHER; note = 2'O-methyl cytidine phosphorothioate
  modified_base 135: mod_base = OTHER; note = 2'O-methyl cytidine
tccaggccgtgcataaggctgttttagagctagaaatagcaagttaaaataaggctagtccgttatcaacttgaaaaagtggcaccgagtcggtgccctttctcgtcgatggtcagcacagccttatgcacggcc

SEQ ID NO: 24854 - RNA, 134 nt, synthetic construct
  source 1..134: mol_type = other RNA
  modified_base 1: mod_base = OTHER; note = 2'O-methyl uridine phosphorothioate
  modified_base 2: mod_base = OTHER; note = 2'O-methyl cytidine phosphorothioate
  modified_base 3: mod_base = OTHER; note = 2'O-methyl cytidine phosphorothioate
  modified_base 131: mod_base = OTHER; note = cytidine phosphorothioate
  modified_base 132: mod_base = OTHER; note = 2'O-methyl guanosine phosphorothioate
  modified_base 133: mod_base = OTHER; note = 2'O-methyl guanosine phosphorothioate
  modified_base 134: mod_base = OTHER; note = 2'O-methyl cytidine
tccaggccgtgcataaggctgttttagagctagaaatagcaagttaaaataaggctagtccgttatcaacttgaaaaagtggcaccgagtcggtgccctttctcgtcgatggtcagcacagccttatgcacggc

SEQ ID NO: 24855 - RNA, 133 nt, synthetic construct
  source 1..133: mol_type = other RNA
  modified_base 1: mod_base = OTHER; note = 2'O-methyl uridine phosphorothioate
  modified_base 2: mod_base = OTHER; note = 2'O-methyl cytidine phosphorothioate
  modified_base 3: mod_base = OTHER; note = 2'O-methyl cytidine phosphorothioate
  modified_base 130: mod_base = OTHER; note = adenosine phosphorothioate
  modified_base 131: mod_base = OTHER; note = 2'O-methyl cytidine phosphorothioate
  modified_base 132: mod_base = OTHER; note = 2'O-methyl guanosine phosphorothioate
  modified_base 133: mod_base = OTHER; note = 2'O-methyl guanosine
tccaggccgtgcataaggctgttttagagctagaaatagcaagttaaaataaggctagtccgttatcaacttgaaaaagtggcaccgagtcggtgccctttctcgtcgatggtcagcacagccttatgcacgg

SEQ ID NO: 24856 - RNA, 132 nt, synthetic construct
  source 1..132: mol_type = other RNA
  modified_base 1: mod_base = OTHER; note = 2'O-methyl uridine phosphorothioate
  modified_base 2: mod_base = OTHER; note = 2'O-methyl cytidine phosphorothioate
  modified_base 3: mod_base = OTHER; note = 2'O-methyl cytidine phosphorothioate
  modified_base 129: mod_base = OTHER; note = cytidine phosphorothioate
  modified_base 130: mod_base = OTHER; note = 2'O-methyl adenosine phosphorothioate
  modified_base 131: mod_base = OTHER; note = 2'O-methyl cytidine phosphorothioate
  modified_base 132: mod_base = OTHER; note = 2'O-methyl guanosine
tccaggccgtgcataaggctgttttagagctagaaatagcaagttaaaataaggctagtccgttatcaacttgaaaaagtggcaccgagtcggtgccctttctcgtcgatggtcagcacagccttatgcacg

SEQ ID NO: 24857 - RNA, 131 nt, synthetic construct
  source 1..131: mol_type = other RNA
  modified_base 1: mod_base = OTHER; note = 2'O-methyl uridine phosphorothioate
  modified_base 2: mod_base = OTHER; note = 2'O-methyl cytidine phosphorothioate
  modified_base 3: mod_base = OTHER; note = 2'O-methyl cytidine phosphorothioate
  modified_base 128: mod_base = OTHER; note = guanosine phosphorothioate
  modified_base 129: mod_base = OTHER; note = 2'O-methyl cytidine phosphorothioate
  modified_base 130: mod_base = OTHER; note = 2'O-methyl adenosine phosphorothioate
  modified_base 131: mod_base = OTHER; note = 2'O-methyl cytidine
tccaggccgtgcataaggctgttttagagctagaaatagcaagttaaaataaggctagtccgttatcaacttgaaaaagtggcaccgagtcggtgccctttctcgtcgatggtcagcacagccttatgcac

SEQ ID NO: 24858 - RNA, 130 nt, synthetic construct
  source 1..130: mol_type = other RNA
  modified_base 1: mod_base = OTHER; note = 2'O-methyl uridine phosphorothioate
  modified_base 2: mod_base = OTHER; note = 2'O-methyl cytidine phosphorothioate
  modified_base 3: mod_base = OTHER; note = 2'O-methyl cytidine phosphorothioate
  modified_base 127: mod_base = OTHER; note = uridine phosphorothioate
  modified_base 128: mod_base = OTHER; note = 2'O-methyl guanosine phosphorothioate
  modified_base 129: mod_base = OTHER; note = 2'O-methyl cytidine phosphorothioate
  modified_base 130: mod_base = OTHER; note = 2'O-methyl adenosine
tccaggccgtgcataaggctgttttagagctagaaatagcaagttaaaataaggctagtccgttatcaacttgaaaaagtggcaccgagtcggtgccctttctcgtcgatggtcagcacagccttatgca

SEQ ID NO: 24859 - RNA, 137 nt, synthetic construct
  source 1..137: mol_type = other RNA
  modified_base 1: mod_base = OTHER; note = 2'O-methyl uridine phosphorothioate
  modified_base 2: mod_base = OTHER; note = 2'O-methyl cytidine phosphorothioate
  modified_base 3: mod_base = OTHER; note = 2'O-methyl cytidine phosphorothioate
  modified_base 134: mod_base = OTHER; note = uridine phosphorothioate
  modified_base 135: mod_base = OTHER; note = 2'O-methyl guanosine phosphorothioate
  modified_base 136: mod_base = OTHER; note = 2'O-methyl guanosine phosphorothioate
  modified_base 137: mod_base = OTHER; note = 2'O-methyl adenosine
tccaggccgtgcataaggctgttttagagctagaaatagcaagttaaaataaggctagtccgttatcaacttgaaaaagtggcaccgagtcggtgctttctcgtcgatggtcagcacagccttatgcacggcctgga

SEQ ID NO: 24860 - RNA, 136 nt, synthetic construct
  source 1..136: mol_type = other RNA
  modified_base 1: mod_base = OTHER; note = 2'O-methyl uridine phosphorothioate
  modified_base 2: mod_base = OTHER; note = 2'O-methyl cytidine phosphorothioate
  modified_base 3: mod_base = OTHER; note = 2'O-methyl cytidine phosphorothioate
  modified_base 133: mod_base = OTHER; note = cytidine phosphorothioate
  modified_base 134: mod_base = OTHER; note = 2'O-methyl uridine phosphorothioate
  modified_base 135: mod_base = OTHER; note = 2'O-methyl guanosine phosphorothioate
  modified_base 136: mod_base = OTHER; note = 2'O-methyl guanosine
tccaggccgtgcataaggctgttttagagctagaaatagcaagttaaaataaggctagtccgttatcaacttgaaaaagtggcaccgagtcggtgctttctcgtcgatggtcagcacagccttatgcacggcctgg

SEQ ID NO: 24861 - RNA, 135 nt, synthetic construct
  source 1..135: mol_type = other RNA
  modified_base 1: mod_base = OTHER; note = 2'O-methyl uridine phosphorothioate
  modified_base 2: mod_base = OTHER; note = 2'O-methyl cytidine phosphorothioate
  modified_base 3: mod_base = OTHER; note = 2'O-methyl cytidine phosphorothioate
  modified_base 132: mod_base = OTHER; note = cytidine phosphorothioate
  modified_base 133: mod_base = OTHER; note = 2'O-methyl cytidine phosphorothioate
  modified_base 134: mod_base = OTHER; note = 2'O-methyl uridine phosphorothioate
  modified_base 135: mod_base = OTHER; note = 2'O-methyl guanosine
tccaggccgtgcataaggctgttttagagctagaaatagcaagttaaaataaggctagtccgttatcaacttgaaaaagtggcaccgagtcggtgctttctcgtcgatggtcagcacagccttatgcacggcctg

SEQ ID NO: 24862 - RNA, 134 nt, synthetic construct
  source 1..134: mol_type = other RNA
  modified_base 1: mod_base = OTHER; note = 2'O-methyl uridine phosphorothioate
  modified_base 2: mod_base = OTHER; note = 2'O-methyl cytidine phosphorothioate
  modified_base 3: mod_base = OTHER; note = 2'O-methyl cytidine phosphorothioate
  modified_base 131: mod_base = OTHER; note = guanosine phosphorothioate
  modified_base 132: mod_base = OTHER; note = 2'O-methyl cytidine phosphorothioate
  modified_base 133: mod_base = OTHER; note = 2'O-methyl cytidine phosphorothioate
  modified_base 134: mod_base = OTHER; note = 2'O-methyl uridine
tccaggccgtgcataaggctgttttagagctagaaatagcaagttaaaataaggctagtccgttatcaacttgaaaaagtggcaccgagtcggtgctttctcgtcgatggtcagcacagccttatgcacggcct

SEQ ID NO: 24863 - RNA, 133 nt, synthetic construct
  source 1..133: mol_type = other RNA
  modified_base 1: mod_base = OTHER; note = 2'O-methyl uridine phosphorothioate
  modified_base 2: mod_base = OTHER; note = 2'O-methyl cytidine phosphorothioate
  modified_base 3: mod_base = OTHER; note = 2'O-methyl cytidine phosphorothioate
  modified_base 130: mod_base = OTHER; note = guanosine phosphorothioate
  modified_base 131: mod_base = OTHER; note = 2'O-methyl guanosine phosphorothioate
  modified_base 132: mod_base = OTHER; note = 2'O-methyl cytidine phosphorothioate
  modified_base 133: mod_base = OTHER; note = 2'O-methyl cytidine
tccaggccgtgcataaggctgttttagagctagaaatagcaagttaaaataaggctagtccgttatcaacttgaaaaagtggcaccgagtcggtgctttctcgtcgatggtcagcacagccttatgcacggcc

SEQ ID NO: 24864 - RNA, 132 nt, synthetic construct
  source 1..132: mol_type = other RNA
  modified_base 1: mod_base = OTHER; note = 2'O-methyl uridine phosphorothioate
  modified_base 2: mod_base = OTHER; note = 2'O-methyl cytidine phosphorothioate
  modified_base 3: mod_base = OTHER; note = 2'O-methyl cytidine phosphorothioate
  modified_base 129: mod_base = OTHER; note = cytidine phosphorothioate
  modified_base 130: mod_base = OTHER; note = 2'O-methyl guanosine phosphorothioate
  modified_base 131: mod_base = OTHER; note = 2'O-methyl guanosine phosphorothioate
  modified_base 132: mod_base = OTHER; note = 2'O-methyl cytidine
tccaggccgtgcataaggctgttttagagctagaaatagcaagttaaaataaggctagtccgttatcaacttgaaaaagtggcaccgagtcggtgctttctcgtcgatggtcagcacagccttatgcacggc

SEQ ID NO: 24865 - RNA, 131 nt, synthetic construct
  source 1..131: mol_type = other RNA
  modified_base 1: mod_base = OTHER; note = 2'O-methyl uridine phosphorothioate
  modified_base 2: mod_base = OTHER; note = 2'O-methyl cytidine phosphorothioate
  modified_base 3: mod_base = OTHER; note = 2'O-methyl cytidine phosphorothioate
  modified_base 128: mod_base = OTHER; note = adenosine phosphorothioate
  modified_base 129: mod_base = OTHER; note = 2'O-methyl cytidine phosphorothioate
  modified_base 130: mod_base = OTHER; note = 2'O-methyl guanosine phosphorothioate
  modified_base 131: mod_base = OTHER; note = 2'O-methyl guanosine
tccaggccgtgcataaggctgttttagagctagaaatagcaagttaaaataaggctagtccgttatcaacttgaaaaagtggcaccgagtcggtgctttctcgtcgatggtcagcacagccttatgcacgg

SEQ ID NO: 24866 - RNA, 130 nt, synthetic construct
  source 1..130: mol_type = other RNA
  modified_base 1: mod_base = OTHER; note = 2'O-methyl uridine phosphorothioate
  modified_base 2: mod_base = OTHER; note = 2'O-methyl cytidine phosphorothioate
  modified_base 3: mod_base = OTHER; note = 2'O-methyl cytidine phosphorothioate
  modified_base 127: mod_base = OTHER; note = cytidine phosphorothioate
  modified_base 128: mod_base = OTHER; note = 2'O-methyl adenosine phosphorothioate
  modified_base 129: mod_base = OTHER; note = 2'O-methyl cytidine phosphorothioate
  modified_base 130: mod_base = OTHER; note = 2'O-methyl guanosine
tccaggccgtgcataaggctgttttagagctagaaatagcaagttaaaataaggctagtccgttatcaacttgaaaaagtggcaccgagtcggtgctttctcgtcgatggtcagcacagccttatgcacg

SEQ ID NO: 24867 - RNA, 129 nt, synthetic construct
  source 1..129: mol_type = other RNA
  modified_base 1: mod_base = OTHER; note = 2'O-methyl uridine phosphorothioate
  modified_base 2: mod_base = OTHER; note = 2'O-methyl cytidine phosphorothioate
  modified_base 3: mod_base = OTHER; note = 2'O-methyl cytidine phosphorothioate
  modified_base 126: mod_base = OTHER; note = guanosine phosphorothioate
  modified_base 127: mod_base = OTHER; note = 2'O-methyl cytidine phosphorothioate
  modified_base 128: mod_base = OTHER; note = 2'O-methyl adenosine phosphorothioate
  modified_base 129: mod_base = OTHER; note = 2'O-methyl cytidine
tccaggccgtgcataaggctgttttagagctagaaatagcaagttaaaataaggctagtccgttatcaacttgaaaaagtggcaccgagtcggtgctttctcgtcgatggtcagcacagccttatgcac

SEQ ID NO: 24868 - RNA, 128 nt, synthetic construct
  source 1..128: mol_type = other RNA
  modified_base 1: mod_base = OTHER; note = 2'O-methyl uridine phosphorothioate
  modified_base 2: mod_base = OTHER; note = 2'O-methyl cytidine phosphorothioate
  modified_base 3: mod_base = OTHER; note = 2'O-methyl cytidine phosphorothioate
  modified_base 125: mod_base = OTHER; note = uridine phosphorothioate
  modified_base 126: mod_base = OTHER; note = 2'O-methyl guanosine phosphorothioate
  modified_base 127: mod_base = OTHER; note = 2'O-methyl cytidine phosphorothioate
  modified_base 128: mod_base = OTHER; note = 2'O-methyl adenosine
tccaggccgtgcataaggctgttttagagctagaaatagcaagttaaaataaggctagtccgttatcaacttgaaaaagtggcaccgagtcggtgctttctcgtcgatggtcagcacagccttatgca

SEQ ID NO: 24869 - RNA, 135 nt, synthetic construct
  source 1..135: mol_type = other RNA
  modified_base 1: mod_base = OTHER; note = 2'O-methyl uridine phosphorothioate
  modified_base 2: mod_base = OTHER; note = 2'O-methyl cytidine phosphorothioate
  modified_base 3: mod_base = OTHER; note = 2'O-methyl cytidine phosphorothioate
  modified_base 132: mod_base = OTHER; note = uridine phosphorothioate
  modified_base 133: mod_base = OTHER; note = 2'O-methyl guanosine phosphorothioate
  modified_base 134: mod_base = OTHER; note = 2'O-methyl guanosine phosphorothioate
  modified_base 135: mod_base = OTHER; note = 2'O-methyl adenosine
tccaggccgtgcataaggctgttttagagctagaaatagcaagttaaaataaggctagtccgttatcaacttgaaaaagtggcaccgagtcggtgctctcgtcgatggtcagcacagccttatgcacggcctgga

SEQ ID NO: 24870 - RNA, 134 nt, synthetic construct
  source 1..134: mol_type = other RNA
  modified_base 1: mod_base = OTHER; note = 2'O-methyl uridine phosphorothioate
  modified_base 2: mod_base = OTHER; note = 2'O-methyl cytidine phosphorothioate
  modified_base 3: mod_base = OTHER; note = 2'O-methyl cytidine phosphorothioate
  modified_base 131: mod_base = OTHER; note = cytidine phosphorothioate
  modified_base 132: mod_base = OTHER; note = 2'O-methyl uridine phosphorothioate
  modified_base 133: mod_base = OTHER; note = 2'O-methyl guanosine phosphorothioate
  modified_base 134: mod_base = OTHER; note = 2'O-methyl guanosine
tccaggccgtgcataaggctgttttagagctagaaatagcaagttaaaataaggctagtccgttatcaacttgaaaaagtggcaccgagtcggtgctctcgtcgatggtcagcacagccttatgcacggcctgg

SEQ ID NO: 24871 - RNA, 133 nt, synthetic construct
  source 1..133: mol_type = other RNA
  modified_base 1: mod_base = OTHER; note = 2'O-methyl uridine phosphorothioate
  modified_base 2: mod_base = OTHER; note = 2'O-methyl cytidine phosphorothioate
  modified_base 3: mod_base = OTHER; note = 2'O-methyl cytidine phosphorothioate
  modified_base 130: mod_base = OTHER; note = cytidine phosphorothioate
  modified_base 131: mod_base = OTHER; note = 2'O-methyl cytidine phosphorothioate
  modified_base 132: mod_base = OTHER; note = 2'O-methyl uridine phosphorothioate
  modified_base 133: mod_base = OTHER; note = 2'O-methyl guanosine
tccaggccgtgcataaggctgttttagagctagaaatagcaagttaaaataaggctagtccgttatcaacttgaaaaagtggcaccgagtcggtgctctcgtcgatggtcagcacagccttatgcacggcctg

SEQ ID NO: 24872 - RNA, 132 nt, synthetic construct
  source 1..132: mol_type = other RNA
  modified_base 1: mod_base = OTHER; note = 2'O-methyl uridine phosphorothioate
  modified_base 2: mod_base = OTHER; note = 2'O-methyl cytidine phosphorothioate
  modified_base 3: mod_base = OTHER; note = 2'O-methyl cytidine phosphorothioate
  modified_base 129: mod_base = OTHER; note = guanosine phosphorothioate
  modified_base 130: mod_base = OTHER; note = 2'O-methyl cytidine phosphorothioate
  modified_base 131: mod_base = OTHER; note = 2'O-methyl cytidine phosphorothioate
  modified_base 132: mod_base = OTHER; note = 2'O-methyl uridine
tccaggccgtgcataaggctgttttagagctagaaatagcaagttaaaataaggctagtccgttatcaacttgaaaaagtggcaccgagtcggtgctctcgtcgatggtcagcacagccttatgcacggcct

SEQ ID NO: 24873 - RNA, 131 nt, synthetic construct
  source 1..131: mol_type = other RNA
  modified_base 1: mod_base = OTHER; note = 2'O-methyl uridine phosphorothioate
  modified_base 2: mod_base = OTHER; note = 2'O-methyl cytidine phosphorothioate
  modified_base 3: mod_base = OTHER; note = 2'O-methyl cytidine phosphorothioate
  modified_base 128: mod_base = OTHER; note = guanosine phosphorothioate
  modified_base 129: mod_base = OTHER; note = 2'O-methyl guanosine phosphorothioate
  modified_base 130: mod_base = OTHER; note = 2'O-methyl cytidine phosphorothioate
  modified_base 131: mod_base = OTHER; note = 2'O-methyl cytidine
tccaggccgtgcataaggctgttttagagctagaaatagcaagttaaaataaggctagtccgttatcaacttgaaaaagtggcaccgagtcggtgctctcgtcgatggtcagcacagccttatgcacggcc

SEQ ID NO: 24874 - RNA, 130 nt, synthetic construct
  source 1..130: mol_type = other RNA
  modified_base 1: mod_base = OTHER; note = 2'O-methyl uridine phosphorothioate
  modified_base 2: mod_base = OTHER; note = 2'O-methyl cytidine phosphorothioate
  modified_base 3: mod_base = OTHER; note = 2'O-methyl cytidine phosphorothioate
  modified_base 127: mod_base = OTHER; note = cytidine phosphorothioate
  modified_base 128: mod_base = OTHER; note = 2'O-methyl guanosine phosphorothioate
  modified_base 129: mod_base = OTHER; note = 2'O-methyl guanosine phosphorothioate
  modified_base 130: mod_base = OTHER; note = 2'O-methyl cytidine
tccaggccgtgcataaggctgttttagagctagaaatagcaagttaaaataaggctagtccgttatcaacttgaaaaagtggcaccgagtcggtgctctcgtcgatggtcagcacagccttatgcacggc

SEQ ID NO: 24875 - RNA, 129 nt, synthetic construct
  source 1..129: mol_type = other RNA
  modified_base 1: mod_base = OTHER; note = 2'O-methyl uridine phosphorothioate
  modified_base 2: mod_base = OTHER; note = 2'O-methyl cytidine phosphorothioate
  modified_base 3: mod_base = OTHER; note = 2'O-methyl cytidine phosphorothioate
  modified_base 126: mod_base = OTHER; note = adenosine phosphorothioate
  modified_base 127: mod_base = OTHER; note = 2'O-methyl cytidine phosphorothioate
  modified_base 128: mod_base = OTHER; note = 2'O-methyl guanosine phosphorothioate
  modified_base 129: mod_base = OTHER; note = 2'O-methyl guanosine
tccaggccgtgcataaggctgttttagagctagaaatagcaagttaaaataaggctagtccgttatcaacttgaaaaagtggcaccgagtcggtgctctcgtcgatggtcagcacagccttatgcacgg

SEQ ID NO: 24876 - RNA, 128 nt, synthetic construct
  source 1..128: mol_type = other RNA
  modified_base 1: mod_base = OTHER; note = 2'O-methyl uridine phosphorothioate
  modified_base 2: mod_base = OTHER; note = 2'O-methyl cytidine phosphorothioate
  modified_base 3: mod_base = OTHER; note = 2'O-methyl cytidine phosphorothioate
  modified_base 125: mod_base = OTHER; note = cytidine phosphorothioate
  modified_base 126: mod_base = OTHER; note = 2'O-methyl adenosine phosphorothioate
  modified_base 127: mod_base = OTHER; note = 2'O-methyl cytidine phosphorothioate
  modified_base 128: mod_base = OTHER; note = 2'O-methyl guanosine
tccaggccgtgcataaggctgttttagagctagaaatagcaagttaaaataaggctagtccgttatcaacttgaaaaagtggcaccgagtcggtgctctcgtcgatggtcagcacagccttatgcacg

SEQ ID NO: 24877 - RNA, 127 nt, synthetic construct
  source 1..127: mol_type = other RNA
  modified_base 1: mod_base = OTHER; note = 2'O-methyl uridine phosphorothioate
  modified_base 2: mod_base = OTHER; note = 2'O-methyl cytidine phosphorothioate
  modified_base 3: mod_base = OTHER; note = 2'O-methyl cytidine phosphorothioate
  modified_base 124: mod_base = OTHER; note = guanosine phosphorothioate
  modified_base 125: mod_base = OTHER; note = 2'O-methyl cytidine phosphorothioate
  modified_base 126: mod_base = OTHER; note = 2'O-methyl adenosine phosphorothioate
  modified_base 127: mod_base = OTHER; note = 2'O-methyl cytidine
tccaggccgtgcataaggctgttttagagctagaaatagcaagttaaaataaggctagtccgttatcaacttgaaaaagtggcaccgagtcggtgctctcgtcgatggtcagcacagccttatgcac

SEQ ID NO: 24878 - RNA, 126 nt, synthetic construct
  source 1..126: mol_type = other RNA
  modified_base 1: mod_base = OTHER; note = 2'O-methyl uridine phosphorothioate
  modified_base 2: mod_base = OTHER; note = 2'O-methyl cytidine phosphorothioate
  modified_base 3: mod_base = OTHER; note = 2'O-methyl cytidine phosphorothioate
  modified_base 123: mod_base = OTHER; note = uridine phosphorothioate
  modified_base 124: mod_base = OTHER; note = 2'O-methyl guanosine phosphorothioate
  modified_base 125: mod_base = OTHER; note = 2'O-methyl cytidine phosphorothioate
  modified_base 126: mod_base = OTHER; note = 2'O-methyl adenosine
tccaggccgtgcataaggctgttttagagctagaaatagcaagttaaaataaggctagtccgttatcaacttgaaaaagtggcaccgagtcggtgctctcgtcgatggtcagcacagccttatgca

SEQ ID NO: 24879 - RNA, 144 nt, synthetic construct; identical to SEQ ID NO: 24069
  source 1..144: mol_type = other RNA

SEQ ID NO: 24880 - RNA, 143 nt, synthetic construct; identical to SEQ ID NO: 24070
  source 1..143: mol_type = other RNA

SEQ ID NO: 24881 - RNA, 142 nt, synthetic construct; identical to SEQ ID NO: 24071
  source 1..142: mol_type = other RNA

SEQ ID NO: 24882 - RNA, 141 nt, synthetic construct; identical to SEQ ID NO: 24072
  source 1..141: mol_type = other RNA

SEQ ID NO: 24883 - RNA, 140 nt, synthetic construct; identical to SEQ ID NO: 24073
  source 1..140: mol_type = other RNA

SEQ ID NO: 24884 - RNA, 139 nt, synthetic construct; identical to SEQ ID NO: 24074
  source 1..139: mol_type = other RNA

SEQ ID NO: 24885 - RNA, 138 nt, synthetic construct; identical to SEQ ID NO: 24075
  source 1..138: mol_type = other RNA

SEQ ID NO: 24886 - RNA, 137 nt, synthetic construct; identical to SEQ ID NO: 24076
  source 1..137: mol_type = other RNA

SEQ ID NO: 24887 - RNA, 136 nt, synthetic construct; identical to SEQ ID NO: 24077
  source 1..136: mol_type = other RNA

SEQ ID NO: 24888 - RNA, 135 nt, synthetic construct; identical to SEQ ID NO: 24078
  source 1..135: mol_type = other RNA

SEQ ID NO: 24889 - RNA, 139 nt, synthetic construct; identical to SEQ ID NO: 24079
  source 1..139: mol_type = other RNA

SEQ ID NO: 24890 - RNA, 138 nt, synthetic construct; identical to SEQ ID NO: 24080
  source 1..138: mol_type = other RNA

SEQ ID NO: 24891 - RNA, 137 nt, synthetic construct; identical to SEQ ID NO: 24081
  source 1..137: mol_type = other RNA

SEQ ID NO: 24892 - RNA, 136 nt, synthetic construct; identical to SEQ ID NO: 24082
  source 1..136: mol_type = other RNA

SEQ ID NO: 24893 - RNA, 135 nt, synthetic construct; identical to SEQ ID NO: 24083
  source 1..135: mol_type = other RNA

SEQ ID NO: 24894 - RNA, 134 nt, synthetic construct; identical to SEQ ID NO: 24084
  source 1..134: mol_type = other RNA

SEQ ID NO: 24895 - RNA, 133 nt, synthetic construct; identical to SEQ ID NO: 24085
  source 1..133: mol_type = other RNA

SEQ ID NO: 24896 - RNA, 132 nt, synthetic construct; identical to SEQ ID NO: 24086
  source 1..132: mol_type = other RNA

SEQ ID NO: 24897 - RNA, 131 nt, synthetic construct; identical to SEQ ID NO: 24087
  source 1..131: mol_type = other RNA

SEQ ID NO: 24898 - RNA, 130 nt, synthetic construct; identical to SEQ ID NO: 24088
  source 1..130: mol_type = other RNA

SEQ ID NO: 24899 - RNA, 134 nt, synthetic construct; identical to SEQ ID NO: 24089
  source 1..134: mol_type = other RNA

SEQ ID NO: 24900 - RNA, 133 nt, synthetic construct; identical to SEQ ID NO: 24090
  source 1..133: mol_type = other RNA

SEQ ID NO: 24901 - RNA, 132 nt, synthetic construct; identical to SEQ ID NO: 24091
  source 1..132: mol_type = other RNA

SEQ ID NO: 24902 - RNA, 131 nt, synthetic construct; identical to SEQ ID NO: 24092
  source 1..131: mol_type = other RNA

SEQ ID NO: 24903 - RNA, 130 nt, synthetic construct; identical to SEQ ID NO: 24093
  source 1..130: mol_type = other RNA

SEQ ID NO: 24904 - RNA, 129 nt, synthetic construct; identical to SEQ ID NO: 24094
  source 1..129: mol_type = other RNA

SEQ ID NO: 24905 - RNA, 128 nt, synthetic construct; identical to SEQ ID NO: 24095
  source 1..128: mol_type = other RNA

SEQ ID NO: 24906 - RNA, 127 nt, synthetic construct; identical to SEQ ID NO: 24096
  source 1..127: mol_type = other RNA

SEQ ID NO: 24907 - RNA, 126 nt, synthetic construct; identical to SEQ ID NO: 24097
  source 1..126: mol_type = other RNA

SEQ ID NO: 24908 - RNA, 125 nt, synthetic construct; identical to SEQ ID NO: 24098
  source 1..125: mol_type = other RNA

SEQ ID NO: 24909 - RNA, 128 nt, synthetic construct; identical to SEQ ID NO: 24099
  source 1..128: mol_type = other RNA

SEQ ID NO: 24910 - RNA, 127 nt, synthetic construct; identical to SEQ ID NO: 24100
  source 1..127: mol_type = other RNA

SEQ ID NO: 24911 - RNA, 126 nt, synthetic construct; identical to SEQ ID NO: 24101
  source 1..126: mol_type = other RNA

SEQ ID NO: 24912 - RNA, 125 nt, synthetic construct; identical to SEQ ID NO: 24102
  source 1..125: mol_type = other RNA

SEQ ID NO: 24913 - RNA, 124 nt, synthetic construct; identical to SEQ ID NO: 24103
  source 1..124: mol_type = other RNA

SEQ ID NO: 24914 - RNA, 123 nt, synthetic construct; identical to SEQ ID NO: 24104
  source 1..123: mol_type = other RNA

SEQ ID NO: 24915 - RNA, 122 nt, synthetic construct; identical to SEQ ID NO: 24105
  source 1..122: mol_type = other RNA

SEQ ID NO: 24916 - RNA, 121 nt, synthetic construct; identical to SEQ ID NO: 24106
  source 1..121: mol_type = other RNA

SEQ ID NO: 24917 - RNA, 120 nt, synthetic construct; identical to SEQ ID NO: 24107
  source 1..120: mol_type = other RNA

SEQ ID NO: 24918 - RNA, 119 nt, synthetic construct; identical to SEQ ID NO: 24108
  source 1..119: mol_type = other RNA

SEQ ID NO: 24919 - RNA, 125 nt, synthetic construct; identical to SEQ ID NO: 24109
  source 1..125: mol_type = other RNA

SEQ ID NO: 24920 - RNA, 124 nt, synthetic construct; identical to SEQ ID NO: 24110
  source 1..124: mol_type = other RNA

SEQ ID NO: 24921 - RNA, 123 nt, synthetic construct; identical to SEQ ID NO: 24111
  source 1..123: mol_type = other RNA

SEQ ID NO: 24922 - RNA, 122 nt, synthetic construct; identical to SEQ ID NO: 24112
  source 1..122: mol_type = other RNA

SEQ ID NO: 24923 - RNA, 121 nt, synthetic construct; identical to SEQ ID NO: 24113
  source 1..121: mol_type = other RNA

SEQ ID NO: 24924 - RNA, 120 nt, synthetic construct; identical to SEQ ID NO: 24114
  source 1..120: mol_type = other RNA

SEQ ID NO: 24925 - RNA, 119 nt, synthetic construct; identical to SEQ ID NO: 24115
  source 1..119: mol_type = other RNA

SEQ ID NO: 24926 - RNA, 118 nt, synthetic construct; identical to SEQ ID NO: 24116
  source 1..118: mol_type = other RNA

SEQ ID NO: 24927 - RNA, 117 nt, synthetic construct; identical to SEQ ID NO: 24117
  source 1..117: mol_type = other RNA

SEQ ID NO: 24928 - RNA, 116 nt, synthetic construct; identical to SEQ ID NO: 24118
  source 1..116: mol_type = other RNA

SEQ ID NO: 24929 - RNA, 123 nt, synthetic construct; identical to SEQ ID NO: 24119
  source 1..123: mol_type = other RNA

SEQ ID NO: 24930 - RNA, 122 nt, synthetic construct; identical to SEQ ID NO: 24120
  source 1..122: mol_type = other RNA

SEQ ID NO: 24931 - RNA, 121 nt, synthetic construct; identical to SEQ ID NO: 24121
  source 1..121: mol_type = other RNA

SEQ ID NO: 24932 - RNA, 120 nt, synthetic construct; identical to SEQ ID NO: 24122
  source 1..120: mol_type = other RNA

SEQ ID NO: 24933 - RNA, 119 nt, synthetic construct; identical to SEQ ID NO: 24123
  source 1..119: mol_type = other RNA

SEQ ID NO: 24934 - RNA, 118 nt, synthetic construct; identical to SEQ ID NO: 24124
  source 1..118: mol_type = other RNA

SEQ ID NO: 24935 - RNA, 117 nt, synthetic construct; identical to SEQ ID NO: 24125
  source 1..117: mol_type = other RNA

SEQ ID NO: 24936 - RNA, 116 nt, synthetic construct; identical to SEQ ID NO: 24126
  source 1..116: mol_type = other RNA

SEQ ID NO: 24937 - RNA, 115 nt, synthetic construct; identical to SEQ ID NO: 24127
  source 1..115: mol_type = other RNA

SEQ ID NO: 24938 - RNA, 114 nt, synthetic construct; identical to SEQ ID NO: 24128
  source 1..114: mol_type = other RNA

SEQ ID NO: 24939 - RNA, 121 nt, synthetic construct; identical to SEQ ID NO: 24129
  source 1..121: mol_type = other RNA

SEQ ID NO: 24940 - RNA, 120 nt, synthetic construct; identical to SEQ ID NO: 24130
  source 1..120: mol_type = other RNA

SEQ ID NO: 24941 - RNA, 119 nt, synthetic construct; identical to SEQ ID NO: 24131
  source 1..119: mol_type = other RNA

SEQ ID NO: 24942 - RNA, 118 nt, synthetic construct; identical to SEQ ID NO: 24132
  source 1..118: mol_type = other RNA

SEQ ID NO: 24943 - RNA, 117 nt, synthetic construct; identical to SEQ ID NO: 24133
  source 1..117: mol_type = other RNA

SEQ ID NO: 24944 - RNA, 116 nt, synthetic construct; identical to SEQ ID NO: 24134
  source 1..116: mol_type = other RNA

SEQ ID NO: 24945 - RNA, 115 nt, synthetic construct; identical to SEQ ID NO: 24135
  source 1..115: mol_type = other RNA

SEQ ID NO: 24946 - RNA, 114 nt, synthetic construct; identical to SEQ ID NO: 24136
  source 1..114: mol_type = other RNA

SEQ ID NO: 24947 - RNA, 113 nt, synthetic construct; identical to SEQ ID NO: 24137
  source 1..113: mol_type = other RNA

SEQ ID NO: 24948 - RNA, 112 nt, synthetic construct; identical to SEQ ID NO: 24138
  source 1..112: mol_type = other RNA

SEQ ID NO: 24949 - RNA, 119 nt, synthetic construct; identical to SEQ ID NO: 24139
  source 1..119: mol_type = other RNA

SEQ ID NO: 24950 - RNA, 118 nt, synthetic construct; identical to SEQ ID NO: 24140
  source 1..118: mol_type = other RNA

SEQ ID NO: 24951 - RNA, 117 nt, synthetic construct; identical to SEQ ID NO: 24141
  source 1..117: mol_type = other RNA

SEQ ID NO: 24952 - RNA, 116 nt, synthetic construct; identical to SEQ ID NO: 24142
  source 1..116: mol_type = other RNA

SEQ ID NO: 24953 - RNA, 115 nt, synthetic construct; identical to SEQ ID NO: 24143
  source 1..115: mol_type = other RNA

SEQ ID NO: 24954 - RNA, 114 nt, synthetic construct; identical to SEQ ID NO: 24144
  source 1..114: mol_type = other RNA

SEQ ID NO: 24955 - RNA, 113 nt, synthetic construct; identical to SEQ ID NO: 24145
  source 1..113: mol_type = other RNA

SEQ ID NO: 24956 - RNA, 112 nt, synthetic construct; identical to SEQ ID NO: 24146
  source 1..112: mol_type = other RNA

SEQ ID NO: 24957 - RNA, 111 nt, synthetic construct; identical to SEQ ID NO: 24147
  source 1..111: mol_type = other RNA

SEQ ID NO: 24958 - RNA, 110 nt, synthetic construct; identical to SEQ ID NO: 24148
  source 1..110: mol_type = other RNA

SEQ ID NO: 24959 - RNA, 117 nt, synthetic construct; identical to SEQ ID NO: 24149
  source 1..117: mol_type = other RNA

SEQ ID NO: 24960 - RNA, 116 nt, synthetic construct; identical to SEQ ID NO: 24150
  source 1..116: mol_type = other RNA

SEQ ID NO: 24961 - RNA, 115 nt, synthetic construct; identical to SEQ ID NO: 24151
  source 1..115: mol_type = other RNA

SEQ ID NO: 24962 - RNA, 114 nt, synthetic construct; identical to SEQ ID NO: 24152
  source 1..114: mol_type = other RNA

SEQ ID NO: 24963 - RNA, 113 nt, synthetic construct; identical to SEQ ID NO: 24153
  source 1..113: mol_type = other RNA

SEQ ID NO: 24964 - RNA, 112 nt, synthetic construct; identical to SEQ ID NO: 24154
  source 1..112: mol_type = other RNA

SEQ ID NO: 24965 - RNA, 111 nt, synthetic construct; identical to SEQ ID NO: 24155
  source 1..111: mol_type = other RNA

SEQ ID NO: 24966 - RNA, 110 nt, synthetic construct; identical to SEQ ID NO: 24156
  source 1..110: mol_type = other RNA

SEQ ID NO: 24967 - RNA, 109 nt, synthetic construct; identical to SEQ ID NO: 24157
  source 1..109: mol_type = other RNA

SEQ ID NO: 24968 - RNA, 108 nt, synthetic construct; identical to SEQ ID NO: 24158
  source 1..108: mol_type = other RNA

SEQ ID NO: 24969 - RNA, 146 nt, synthetic construct; identical to SEQ ID NO: 24159
  source 1..146: mol_type = other RNA

SEQ ID NO: 24970 - RNA, 145 nt, synthetic construct; identical to SEQ ID NO: 24160
  source 1..145: mol_type = other RNA

SEQ ID NO: 24971 - RNA, 144 nt, synthetic construct; identical to SEQ ID NO: 24161
  source 1..144: mol_type = other RNA

SEQ ID NO: 24972 - RNA, 143 nt, synthetic construct; identical to SEQ ID NO: 24162
  source 1..143: mol_type = other RNA

SEQ ID NO: 24973 - RNA, 142 nt, synthetic construct; identical to SEQ ID NO: 24163
  source 1..142: mol_type = other RNA

SEQ ID NO: 24974 - RNA, 141 nt, synthetic construct; identical to SEQ ID NO: 24164
  source 1..141: mol_type = other RNA

SEQ ID NO: 24975 - RNA, 140 nt, synthetic construct; identical to SEQ ID NO: 24165
  source 1..140: mol_type = other RNA

SEQ ID NO: 24976 - RNA, 139 nt, synthetic construct; identical to SEQ ID NO: 24166
  source 1..139: mol_type = other RNA

SEQ ID NO: 24977 - RNA, 138 nt, synthetic construct; identical to SEQ ID NO: 24167
  source 1..138: mol_type = other RNA

SEQ ID NO: 24978 - RNA, 137 nt, synthetic construct; identical to SEQ ID NO: 24168
  source 1..137: mol_type = other RNA

SEQ ID NO: 24979 - RNA, 141 nt, synthetic construct; identical to SEQ ID NO: 24169
  source 1..141: mol_type = other RNA

SEQ ID NO: 24980 - RNA, 140 nt, synthetic construct; identical to SEQ ID NO: 24170
  source 1..140: mol_type = other RNA

SEQ ID NO: 24981 - RNA, 139 nt, synthetic construct; identical to SEQ ID NO: 24171
  source 1..139: mol_type = other RNA

SEQ ID NO: 24982 - RNA, 138 nt, synthetic construct; identical to SEQ ID NO: 24172
  source 1..138: mol_type = other RNA

SEQ ID NO: 24983 - RNA, 137 nt, synthetic construct; identical to SEQ ID NO: 24173
  source 1..137: mol_type = other RNA

SEQ ID NO: 24984 - RNA, 136 nt, synthetic construct; identical to SEQ ID NO: 24174
  source 1..136: mol_type = other RNA

SEQ ID NO: 24985 - RNA, 135 nt, synthetic construct; identical to SEQ ID NO: 24175
  source 1..135: mol_type = other RNA

SEQ ID NO: 24986 - RNA, 134 nt, synthetic construct; identical to SEQ ID NO: 24176
  source 1..134: mol_type = other RNA

SEQ ID NO: 24987 - RNA, 133 nt, synthetic construct; identical to SEQ ID NO: 24177
  source 1..133: mol_type = other RNA

SEQ ID NO: 24988 - RNA, 132 nt, synthetic construct; identical to SEQ ID NO: 24178
  source 1..132: mol_type = other RNA

SEQ ID NO: 24989 - RNA, 136 nt, synthetic construct; identical to SEQ ID NO: 24179
  source 1..136: mol_type = other RNA

SEQ ID NO: 24990 - RNA, 135 nt, synthetic construct; identical to SEQ ID NO: 24180
  source 1..135: mol_type = other RNA

SEQ ID NO: 24991 - RNA, 134 nt, synthetic construct; identical to SEQ ID NO: 24181
  source 1..134: mol_type = other RNA

SEQ ID NO: 24992 - RNA, 133 nt, synthetic construct; identical to SEQ ID NO: 24182
  source 1..133: mol_type = other RNA

SEQ ID NO: 24993 - RNA, 132 nt, synthetic construct; identical to SEQ ID NO: 24183
  source 1..132: mol_type = other RNA

SEQ ID NO: 24994 - RNA, 131 nt, synthetic construct; identical to SEQ ID NO: 24184
  source 1..131: mol_type = other RNA

SEQ ID NO: 24995 - RNA, 130 nt, synthetic construct; identical to SEQ ID NO: 24185
  source 1..130: mol_type = other RNA

SEQ ID NO: 24996 - RNA, 129 nt, synthetic construct; identical to SEQ ID NO: 24186
  source 1..129: mol_type = other RNA

SEQ ID NO: 24997 - RNA, 128 nt, synthetic construct; identical to SEQ ID NO: 24187
  source 1..128: mol_type = other RNA

SEQ ID NO: 24998 - RNA, 127 nt, synthetic construct; identical to SEQ ID NO: 24188
  source 1..127: mol_type = other RNA

SEQ ID NO: 24999 - RNA, 130 nt, synthetic construct; identical to SEQ ID NO: 24189
  source 1..130: mol_type = other RNA

SEQ ID NO: 25000 - RNA, 129 nt, synthetic construct; identical to SEQ ID NO: 24190
  source 1..129: mol_type = other RNA

SEQ ID NO: 25001 - RNA, 128 nt, synthetic construct; identical to SEQ ID NO: 24191
  source 1..128: mol_type = other RNA

SEQ ID NO: 25002 - RNA, 127 nt, synthetic construct; identical to SEQ ID NO: 24192
  source 1..127: mol_type = other RNA

SEQ ID NO: 25003 - RNA, 126 nt, synthetic construct; identical to SEQ ID NO: 24193
  source 1..126: mol_type = other RNA

SEQ ID NO: 25004 - RNA, 125 nt, synthetic construct; identical to SEQ ID NO: 24194
  source 1..125: mol_type = other RNA

SEQ ID NO: 25005 - RNA, 124 nt, synthetic construct; identical to SEQ ID NO: 24195
  source 1..124: mol_type = other RNA

SEQ ID NO: 25006 - RNA, 123 nt, synthetic construct; identical to SEQ ID NO: 24196
  source 1..123: mol_type = other RNA

SEQ ID NO: 25007 - RNA, 122 nt, synthetic construct; identical to SEQ ID NO: 24197
  source 1..122: mol_type = other RNA

SEQ ID NO: 25008 - RNA, 121 nt, synthetic construct; identical to SEQ ID NO: 24198
  source 1..121: mol_type = other RNA

SEQ ID NO: 25009 - RNA, 127 nt, synthetic construct; identical to SEQ ID NO: 24199
  source 1..127: mol_type = other RNA

SEQ ID NO: 25010 - RNA, 126 nt, synthetic construct; identical to SEQ ID NO: 24200
  source 1..126: mol_type = other RNA

SEQ ID NO: 25011 - RNA, 125 nt, synthetic construct; identical to SEQ ID NO: 24201
  source 1..125: mol_type = other RNA

SEQ ID NO: 25012 - RNA, 124 nt, synthetic construct; identical to SEQ ID NO: 24202
  source 1..124: mol_type = other RNA

SEQ ID NO: 25013 - RNA, 123 nt, synthetic construct; identical to SEQ ID NO: 24203
  source 1..123: mol_type = other RNA

SEQ ID NO: 25014 - RNA, 122 nt, synthetic construct; identical to SEQ ID NO: 24204
  source 1..122: mol_type = other RNA

SEQ ID NO: 25015 - RNA, 121 nt, synthetic construct; identical to SEQ ID NO: 24205
  source 1..121: mol_type = other RNA

SEQ ID NO: 25016 - RNA, 120 nt, synthetic construct; identical to SEQ ID NO: 24206
  source 1..120: mol_type = other RNA

SEQ ID NO: 25017 - RNA, 119 nt, synthetic construct; identical to SEQ ID NO: 24207
  source 1..119: mol_type = other RNA

SEQ ID NO: 25018 - RNA, 118 nt, synthetic construct; identical to SEQ ID NO: 24208
  source 1..118: mol_type = other RNA

SEQ ID NO: 25019 - RNA, 125 nt, synthetic construct; identical to SEQ ID NO: 24209
  source 1..125: mol_type = other RNA

SEQ ID NO: 25020 - RNA, 124 nt, synthetic construct; identical to SEQ ID NO: 24210
  source 1..124: mol_type = other RNA

SEQ ID NO: 25021 - RNA, 123 nt, synthetic construct; identical to SEQ ID NO: 24211
  source 1..123: mol_type = other RNA

SEQ ID NO: 25022 - RNA, 122 nt, synthetic construct; identical to SEQ ID NO: 24212
  source 1..122: mol_type = other RNA

SEQ ID NO: 25023 - RNA, 121 nt, synthetic construct; identical to SEQ ID NO: 24213
  source 1..121: mol_type = other RNA

SEQ ID NO: 25024 - RNA, 120 nt, synthetic construct; identical to SEQ ID NO: 24214
  source 1..120: mol_type = other RNA

SEQ ID NO: 25025 - RNA, 119 nt, synthetic construct; identical to SEQ ID NO: 24215
  source 1..119: mol_type = other RNA

SEQ ID NO: 25026 - RNA, 118 nt, synthetic construct; identical to SEQ ID NO: 24216
  source 1..118: mol_type = other RNA

SEQ ID NO: 25027 - RNA, 117 nt, synthetic construct; identical to SEQ ID NO: 24217
  source 1..117: mol_type = other RNA

SEQ ID NO: 25028 - RNA, 116 nt, synthetic construct; identical to SEQ ID NO: 24218
  source 1..116: mol_type = other RNA

SEQ ID NO: 25029 - RNA, 123 nt, synthetic construct; identical to SEQ ID NO: 24219
  source 1..123: mol_type = other RNA

SEQ ID NO: 25030 - RNA, 122 nt, synthetic construct; identical to SEQ ID NO: 24220
  source 1..122: mol_type = other RNA

SEQ ID NO: 25031 - RNA, 121 nt, synthetic construct; identical to SEQ ID NO: 24221
  source 1..121: mol_type = other RNA

SEQ ID NO: 25032 - RNA, 120 nt, synthetic construct; identical to SEQ ID NO: 24222
  source 1..120: mol_type = other RNA

SEQ ID NO: 25033 - RNA, 119 nt, synthetic construct; identical to SEQ ID NO: 24223
  source 1..119: mol_type = other RNA

SEQ ID NO: 25034 - RNA, 118 nt, synthetic construct; identical to SEQ ID NO: 24224
  source 1..118: mol_type = other RNA

SEQ ID NO: 25035 - RNA, 117 nt, synthetic construct; identical to SEQ ID NO: 24225
  source 1..117: mol_type = other RNA

SEQ ID NO: 25036 - RNA, 116 nt, synthetic construct; identical to SEQ ID NO: 24226
  source 1..116: mol_type = other RNA

SEQ ID NO: 25037 - RNA, 115 nt, synthetic construct; identical to SEQ ID NO: 24227
  source 1..115: mol_type = other RNA

SEQ ID NO: 25038 - RNA, 114 nt, synthetic construct; identical to SEQ ID NO: 24228
  source 1..114: mol_type = other RNA

SEQ ID NO: 25039 - RNA, 121 nt, synthetic construct; identical to SEQ ID NO: 24229
  source 1..121: mol_type = other RNA

SEQ ID NO: 25040 - RNA, 120 nt, synthetic construct; identical to SEQ ID NO: 24230
  source 1..120: mol_type = other RNA

SEQ ID NO: 25041 - RNA, 119 nt, synthetic construct; identical to SEQ ID NO: 24231
  source 1..119: mol_type = other RNA

SEQ ID NO: 25042 - RNA, 118 nt, synthetic construct; identical to SEQ ID NO: 24232
  source 1..118: mol_type = other RNA

SEQ ID NO: 25043 - RNA, 117 nt, synthetic construct; identical to SEQ ID NO: 24233
  source 1..117: mol_type = other RNA

SEQ ID NO: 25044 - RNA, 116 nt, synthetic construct; identical to SEQ ID NO: 24234
  source 1..116: mol_type = other RNA

SEQ ID NO: 25045 - RNA, 115 nt, synthetic construct; identical to SEQ ID NO: 24235
  source 1..115: mol_type = other RNA

SEQ ID NO: 25046 - RNA, 114 nt, synthetic construct; identical to SEQ ID NO: 24236
  source 1..114: mol_type = other RNA

SEQ ID NO: 25047 - RNA, 113 nt, synthetic construct; identical to SEQ ID NO: 24237
  source 1..113: mol_type = other RNA

SEQ ID NO: 25048 - RNA, 112 nt, synthetic construct; identical to SEQ ID NO: 24238
  source 1..112: mol_type = other RNA

SEQ ID NO: 25049 - RNA, 119 nt, synthetic construct; identical to SEQ ID NO: 24239
  source 1..119: mol_type = other RNA

SEQ ID NO: 25050 - RNA, 118 nt, synthetic construct; identical to SEQ ID NO: 24240
  source 1..118: mol_type = other RNA

SEQ ID NO: 25051 - RNA, 117 nt, synthetic construct; identical to SEQ ID NO: 24241
  source 1..117: mol_type = other RNA

SEQ ID NO: 25052 - RNA, 116 nt, synthetic construct; identical to SEQ ID NO: 24242
  source 1..116: mol_type = other RNA

SEQ ID NO: 25053 - RNA, 115 nt, synthetic construct; identical to SEQ ID NO: 24243
  source 1..115: mol_type = other RNA

SEQ ID NO: 25054 - RNA, 114 nt, synthetic construct; identical to SEQ ID NO: 24244
  source 1..114: mol_type = other RNA

SEQ ID NO: 25055 - RNA, 113 nt, synthetic construct; identical to SEQ ID NO: 24245
  source 1..113: mol_type = other RNA

SEQ ID NO: 25056 - RNA, 112 nt, synthetic construct; identical to SEQ ID NO: 24246
  source 1..112: mol_type = other RNA

SEQ ID NO: 25057 - RNA, 111 nt, synthetic construct; identical to SEQ ID NO: 24247
  source 1..111: mol_type = other RNA

SEQ ID NO: 25058 - RNA, 110 nt, synthetic construct; identical to SEQ ID NO: 24248
  source 1..110: mol_type = other RNA

SEQ ID NO: 25059 - RNA, 147 nt, synthetic construct; identical to SEQ ID NO: 24249
  source 1..147: mol_type = other RNA

SEQ ID NO: 25060 - RNA, 146 nt, synthetic construct; identical to SEQ ID NO: 24250
  source 1..146: mol_type = other RNA

SEQ ID NO: 25061 - RNA, 145 nt, synthetic construct; identical to SEQ ID NO: 24251
  source 1..145: mol_type = other RNA

SEQ ID NO: 25062 - RNA, 144 nt, synthetic construct; identical to SEQ ID NO: 24252
  source 1..144: mol_type = other RNA

SEQ ID NO: 25063 - RNA, 143 nt, synthetic construct; identical to SEQ ID NO: 24253
  source 1..143: mol_type = other RNA

SEQ ID NO: 25064 - RNA, 142 nt, synthetic construct; identical to SEQ ID NO: 24254
  source 1..142: mol_type = other RNA

SEQ ID NO: 25065 - RNA, 141 nt, synthetic construct; identical to SEQ ID NO: 24255
  source 1..141: mol_type = other RNA

SEQ ID NO: 25066 - RNA, 140 nt, synthetic construct; identical to SEQ ID NO: 24256
  source 1..140: mol_type = other RNA

SEQ ID NO: 25067 - RNA, 139 nt, synthetic construct; identical to SEQ ID NO: 24257
  source 1..139: mol_type = other RNA

SEQ ID NO: 25068 - RNA, 138 nt, synthetic construct; identical to SEQ ID NO: 24258
  source 1..138: mol_type = other RNA

SEQ ID NO: 25069 - RNA, 142 nt, synthetic construct; identical to SEQ ID NO: 24259
  source 1..142: mol_type = other RNA

SEQ ID NO: 25070 - RNA, 141 nt, synthetic construct; identical to SEQ ID NO: 24260
  source 1..141: mol_type = other RNA

SEQ ID NO: 25071 - RNA, 140 nt, synthetic construct; identical to SEQ ID NO: 24261
  source 1..140: mol_type = other RNA

SEQ ID NO: 25072 - RNA, 139 nt, synthetic construct; identical to SEQ ID NO: 24262
  source 1..139: mol_type = other RNA

SEQ ID NO: 25073 - RNA, 138 nt, synthetic construct; identical to SEQ ID NO: 24263
  source 1..138: mol_type = other RNA

SEQ ID NO: 25074 - RNA, 137 nt, synthetic construct; identical to SEQ ID NO: 24264
  source 1..137: mol_type = other RNA

SEQ ID NO: 25075 - RNA, 136 nt, synthetic construct; identical to SEQ ID NO: 24265
  source 1..136: mol_type = other RNA

SEQ ID NO: 25076 - RNA, 135 nt, synthetic construct; identical to SEQ ID NO: 24266
  source 1..135: mol_type = other RNA

SEQ ID NO: 25077 - RNA, 134 nt, synthetic construct; identical to SEQ ID NO: 24267
  source 1..134: mol_type = other RNA

SEQ ID NO: 25078 - RNA, 133 nt, synthetic construct; identical to SEQ ID NO: 24268
  source 1..133: mol_type = other RNA

SEQ ID NO: 25079 - RNA, 137 nt, synthetic construct; identical to SEQ ID NO: 24269
  source 1..137: mol_type = other RNA

SEQ ID NO: 25080 - RNA, 136 nt, synthetic construct; identical to SEQ ID NO: 24270
  source 1..136: mol_type = other RNA

SEQ ID NO: 25081 - RNA, 135 nt, synthetic construct; identical to SEQ ID NO: 24271
  source 1..135: mol_type = other RNA

SEQ ID NO: 25082 - RNA, 134 nt, synthetic construct; identical to SEQ ID NO: 24272
  source 1..134: mol_type = other RNA

SEQ ID NO: 25083 - RNA, 133 nt, synthetic construct; identical to SEQ ID NO: 24273
  source 1..133: mol_type = other RNA

SEQ ID NO: 25084 - RNA, 132 nt, synthetic construct; identical to SEQ ID NO: 24274
  source 1..132: mol_type = other RNA

SEQ ID NO: 25085 - RNA, 131 nt, synthetic construct; identical to SEQ ID NO: 24275
  source 1..131: mol_type = other RNA

SEQ ID NO: 25086 - RNA, 130 nt, synthetic construct; identical to SEQ ID NO: 24276
  source 1..130: mol_type = other RNA

SEQ ID NO: 25087 - RNA, 129 nt, synthetic construct; identical to SEQ ID NO: 24277
  source 1..129: mol_type = other RNA

SEQ ID NO: 25088 - RNA, 128 nt, synthetic construct; identical to SEQ ID NO: 24278
  source 1..128: mol_type = other RNA

SEQ ID NO: 25089 - RNA, 131 nt, synthetic construct; identical to SEQ ID NO: 24279
  source 1..131: mol_type = other RNA

SEQ ID NO: 25090 - RNA, 130 nt, synthetic construct; identical to SEQ ID NO: 24280
  source 1..130: mol_type = other RNA

SEQ ID NO: 25091 - RNA, 129 nt, synthetic construct; identical to SEQ ID NO: 24281
  source 1..129: mol_type = other RNA

SEQ ID NO: 25092 - RNA, 128 nt, synthetic construct; identical to SEQ ID NO: 24282
  source 1..128: mol_type = other RNA

SEQ ID NO: 25093 - RNA, 127 nt, synthetic construct; identical to SEQ ID NO: 24283
  source 1..127: mol_type = other RNA

SEQ ID NO: 25094 - RNA, 126 nt, synthetic construct; identical to SEQ ID NO: 24284
  source 1..126: mol_type = other RNA

SEQ ID NO: 25095 - RNA, 125 nt, synthetic construct; identical to SEQ ID NO: 24285
  source 1..125: mol_type = other RNA

SEQ ID NO: 25096 - RNA, 124 nt, synthetic construct; identical to SEQ ID NO: 24286
  source 1..124: mol_type = other RNA

SEQ ID NO: 25097 - RNA, 123 nt, synthetic construct; identical to SEQ ID NO: 24287
  source 1..123: mol_type = other RNA

SEQ ID NO: 25098 - RNA, 122 nt, synthetic construct; identical to SEQ ID NO: 24288
  source 1..122: mol_type = other RNA

SEQ ID NO: 25099 - RNA, 128 nt, synthetic construct; identical to SEQ ID NO: 24289
  source 1..128: mol_type = other RNA

SEQ ID NO: 25100 - RNA, 127 nt, synthetic construct; identical to SEQ ID NO: 24290
  source 1..127: mol_type = other RNA

SEQ ID NO: 25101 - RNA, 126 nt, synthetic construct; identical to SEQ ID NO: 24291
  source 1..126: mol_type = other RNA

SEQ ID NO: 25102 - RNA, 125 nt, synthetic construct; identical to SEQ ID NO: 24292
  source 1..125: mol_type = other RNA

SEQ ID NO: 25103 - RNA, 124 nt, synthetic construct; identical to SEQ ID NO: 24293
  source 1..124: mol_type = other RNA

SEQ ID NO: 25104 - RNA, 123 nt, synthetic construct; identical to SEQ ID NO: 24294
  source 1..123: mol_type = other RNA

SEQ ID NO: 25105 - RNA, 122 nt, synthetic construct; identical to SEQ ID NO: 24295
  source 1..122: mol_type = other RNA

SEQ ID NO: 25106 - RNA, 121 nt, synthetic construct; identical to SEQ ID NO: 24296
  source 1..121: mol_type = other RNA

SEQ ID NO: 25107 - RNA, 120 nt, synthetic construct; identical to SEQ ID NO: 24297
  source 1..120: mol_type = other RNA

SEQ ID NO: 25108 - RNA, 119 nt, synthetic construct; identical to SEQ ID NO: 24298
  source 1..119: mol_type = other RNA

SEQ ID NO: 25109 - RNA, 126 nt, synthetic construct; identical to SEQ ID NO: 24299
  source 1..126: mol_type = other RNA

SEQ ID NO: 25110 - RNA, 125 nt, synthetic construct; identical to SEQ ID NO: 24300
  source 1..125: mol_type = other RNA

SEQ ID NO: 25111 - RNA, 124 nt, synthetic construct; identical to SEQ ID NO: 24301
  source 1..124: mol_type = other RNA

SEQ ID NO: 25112 - RNA, 123 nt, synthetic construct; identical to SEQ ID NO: 24302
  source 1..123: mol_type = other RNA

SEQ ID NO: 25113 - RNA, 122 nt, synthetic construct; identical to SEQ ID NO: 24303
  source 1..122: mol_type = other RNA

SEQ ID NO: 25114 - RNA, 121 nt, synthetic construct; identical to SEQ ID NO: 24304
  source 1..121: mol_type = other RNA

SEQ ID NO: 25115 - RNA, 120 nt, synthetic construct; identical to SEQ ID NO: 24305
  source 1..120: mol_type = other RNA

SEQ ID NO: 25116 - RNA, 119 nt, synthetic construct; identical to SEQ ID NO: 24306
  source 1..119: mol_type = other RNA

SEQ ID NO: 25117 - RNA, 118 nt, synthetic construct; identical to SEQ ID NO: 24307
  source 1..118: mol_type = other RNA

SEQ ID NO: 25118 - RNA, 117 nt, synthetic construct; identical to SEQ ID NO: 24308
  source 1..117: mol_type = other RNA

SEQ ID NO: 25119 - RNA, 124 nt, synthetic construct; identical to SEQ ID NO: 24309
  source 1..124: mol_type = other RNA

SEQ ID NO: 25120 - RNA, 123 nt, synthetic construct; identical to SEQ ID NO: 24310
  source 1..123: mol_type = other RNA

SEQ ID NO: 25121 - RNA, 122 nt, synthetic construct; identical to SEQ ID NO: 24311
  source 1..122: mol_type = other RNA

SEQ ID NO: 25122 - RNA, 121 nt, synthetic construct; identical to SEQ ID NO: 24312
  source 1..121: mol_type = other RNA

SEQ ID NO: 25123 - RNA, 120 nt, synthetic construct; identical to SEQ ID NO: 24313
  source 1..120: mol_type = other RNA

SEQ ID NO: 25124 - RNA, 119 nt, synthetic construct; identical to SEQ ID NO: 24314
  source 1..119: mol_type = other RNA

SEQ ID NO: 25125 - RNA, 118 nt, synthetic construct; identical to SEQ ID NO: 24315
  source 1..118: mol_type = other RNA

SEQ ID NO: 25126 - RNA, 117 nt, synthetic construct; identical to SEQ ID NO: 24316
  source 1..117: mol_type = other RNA

SEQ ID NO: 25127 - RNA, 116 nt, synthetic construct; identical to SEQ ID NO: 24317
  source 1..116: mol_type = other RNA

SEQ ID NO: 25128 - RNA, 115 nt, synthetic construct; identical to SEQ ID NO: 24318
  source 1..115: mol_type = other RNA

SEQ ID NO: 25129 - RNA, 122 nt, synthetic construct; identical to SEQ ID NO: 24319
  source 1..122: mol_type = other RNA

SEQ ID NO: 25130 - RNA, 121 nt, synthetic construct; identical to SEQ ID NO: 24320
  source 1..121: mol_type = other RNA

SEQ ID NO: 25131 - RNA, 120 nt, synthetic construct; identical to SEQ ID NO: 24321
  source 1..120: mol_type = other RNA

SEQ ID NO: 25132 - RNA, 119 nt, synthetic construct; identical to SEQ ID NO: 24322
  source 1..119: mol_type = other RNA

SEQ ID NO: 25133 - RNA, 118 nt, synthetic construct; identical to SEQ ID NO: 24323
  source 1..118: mol_type = other RNA

SEQ ID NO: 25134 - RNA, 117 nt, synthetic construct; identical to SEQ ID NO: 24324
  source 1..117: mol_type = other RNA

SEQ ID NO: 25135 - RNA, 116 nt, synthetic construct; identical to SEQ ID NO: 24325
  source 1..116: mol_type = other RNA

SEQ ID NO: 25136 - RNA, 115 nt, synthetic construct; identical to SEQ ID NO: 24326
  source 1..115: mol_type = other RNA

SEQ ID NO: 25137 - RNA, 114 nt, synthetic construct; identical to SEQ ID NO: 24327
  source 1..114: mol_type = other RNA

SEQ ID NO: 25138 - RNA, 113 nt, synthetic construct; identical to SEQ ID NO: 24328
  source 1..113: mol_type = other RNA

SEQ ID NO: 25139 - RNA, 120 nt, synthetic construct; identical to SEQ ID NO: 24329
  source 1..120: mol_type = other RNA

SEQ ID NO: 25140 - RNA, 119 nt, synthetic construct; identical to SEQ ID NO: 24330
  source 1..119: mol_type = other RNA

SEQ ID NO: 25141 - RNA, 118 nt, synthetic construct; identical to SEQ ID NO: 24331
  source 1..118: mol_type = other RNA

SEQ ID NO: 25142 - RNA, 117 nt, synthetic construct; identical to SEQ ID NO: 24332
  source 1..117: mol_type = other RNA

SEQ ID NO: 25143 - RNA, 116 nt, synthetic construct; identical to SEQ ID NO: 24333
  source 1..116: mol_type = other RNA

SEQ ID NO: 25144 - RNA, 115 nt, synthetic construct; identical to SEQ ID NO: 24334
  source 1..115: mol_type = other RNA

SEQ ID NO: 25145 - RNA, 114 nt, synthetic construct; identical to SEQ ID NO: 24335
  source 1..114: mol_type = other RNA

SEQ ID NO: 25146 - RNA, 113 nt, synthetic construct; identical to SEQ ID NO: 24336
  source 1..113: mol_type = other RNA

SEQ ID NO: 25147 - RNA, 112 nt, synthetic construct; identical to SEQ ID NO: 24337
  source 1..112: mol_type = other RNA

SEQ ID NO: 25148 - RNA, 111 nt, synthetic construct; identical to SEQ ID NO: 24338
  source 1..111: mol_type = other RNA

SEQ ID NO: 25149 - RNA, 156 nt, synthetic construct; identical to SEQ ID NO: 24339
  source 1..156: mol_type = other RNA

SEQ ID NO: 25150 - RNA, 155 nt, synthetic construct; identical to SEQ ID NO: 24340
  source 1..155: mol_type = other RNA

SEQ ID NO: 25151 - RNA, 154 nt, synthetic construct; identical to SEQ ID NO: 24341
  source 1..154: mol_type = other RNA

SEQ ID NO: 25152 - RNA, 153 nt, synthetic construct; identical to SEQ ID NO: 24342
  source 1..153: mol_type = other RNA

SEQ ID NO: 25153 - RNA, 152 nt, synthetic construct; identical to SEQ ID NO: 24343
  source 1..152: mol_type = other RNA

SEQ ID NO: 25154 - RNA, 151 nt, synthetic construct; identical to SEQ ID NO: 24344
  source 1..151: mol_type = other RNA

SEQ ID NO: 25155 - RNA, 150 nt, synthetic construct; identical to SEQ ID NO: 24345
  source 1..150: mol_type = other RNA

SEQ ID NO: 25156 - RNA, 149 nt, synthetic construct; identical to SEQ ID NO: 24346
  source 1..149: mol_type = other RNA

SEQ ID NO: 25157 - RNA, 148 nt, synthetic construct; identical to SEQ ID NO: 24347
  source 1..148: mol_type = other RNA

SEQ ID NO: 25158 - RNA, 147 nt, synthetic construct; identical to SEQ ID NO: 24348
  source 1..147: mol_type = other RNA

SEQ ID NO: 25159 - RNA, 151 nt, synthetic construct; identical to SEQ ID NO: 24349
  source 1..151: mol_type = other RNA

SEQ ID NO: 25160 - RNA, 150 nt, synthetic construct; identical to SEQ ID NO: 24350
  source 1..150: mol_type = other RNA

SEQ ID NO: 25161 - RNA, 149 nt, synthetic construct; identical to SEQ ID NO: 24351
  source 1..149: mol_type = other RNA

SEQ ID NO: 25162 - RNA, 148 nt, synthetic construct; identical to SEQ ID NO: 24352
  source 1..148: mol_type = other RNA

SEQ ID NO: 25163 - RNA, 147 nt, synthetic construct; identical to SEQ ID NO: 24353
  source 1..147: mol_type = other RNA

SEQ ID NO: 25164 - RNA, 146 nt, synthetic construct; identical to SEQ ID NO: 24354
  source 1..146: mol_type = other RNA

SEQ ID NO: 25165 - RNA, 145 nt, synthetic construct; identical to SEQ ID NO: 24355
  source 1..145: mol_type = other RNA

SEQ ID NO: 25166 - RNA, 144 nt, synthetic construct; identical to SEQ ID NO: 24356
  source 1..144: mol_type = other RNA

SEQ ID NO: 25167 - RNA, 143 nt, synthetic construct; identical to SEQ ID NO: 24357
  source 1..143: mol_type = other RNA

SEQ ID NO: 25168 - RNA, 142 nt, synthetic construct; identical to SEQ ID NO: 24358
  source 1..142: mol_type = other RNA

SEQ ID NO: 25169 - RNA, 146 nt, synthetic construct; identical to SEQ ID NO: 24359
  source 1..146: mol_type = other RNA

SEQ ID NO: 25170 - RNA, 145 nt, synthetic construct; identical to SEQ ID NO: 24360
  source 1..145: mol_type = other RNA

SEQ ID NO: 25171 - RNA, 144 nt, synthetic construct; identical to SEQ ID NO: 24361
  source 1..144: mol_type = other RNA

SEQ ID NO: 25172 - RNA, 143 nt, synthetic construct; identical to SEQ ID NO: 24362
  source 1..143: mol_type = other RNA

SEQ ID NO: 25173 - RNA, 142 nt, synthetic construct; identical to SEQ ID NO: 24363
  source 1..142: mol_type = other RNA

SEQ ID NO: 25174 - RNA, 141 nt, synthetic construct; identical to SEQ ID NO: 24364
  source 1..141: mol_type = other RNA

SEQ ID NO: 25175 - RNA, 140 nt, synthetic construct; identical to SEQ ID NO: 24365
  source 1..140: mol_type = other RNA

SEQ ID NO: 25176 - RNA, 139 nt, synthetic construct; identical to SEQ ID NO: 24366
  source 1..139: mol_type = other RNA

SEQ ID NO: 25177 - RNA, 138 nt, synthetic construct; identical to SEQ ID NO: 24367
  source 1..138: mol_type = other RNA

SEQ ID NO: 25178 - RNA, 137 nt, synthetic construct; identical to SEQ ID NO: 24368
  source 1..137: mol_type = other RNA

SEQ ID NO: 25179 - RNA, 140 nt, synthetic construct; identical to SEQ ID NO: 24369
  source 1..140: mol_type = other RNA

SEQ ID NO: 25180 - RNA, 139 nt, synthetic construct; identical to SEQ ID NO: 24370
  source 1..139: mol_type = other RNA

SEQ ID NO: 25181 - RNA, 138 nt, synthetic construct; identical to SEQ ID NO: 24371
  source 1..138: mol_type = other RNA

SEQ ID NO: 25182 - RNA, 137 nt, synthetic construct; identical to SEQ ID NO: 24372
  source 1..137: mol_type = other RNA

SEQ ID NO: 25183 - RNA, 136 nt, synthetic construct; identical to SEQ ID NO: 24373
  source 1..136: mol_type = other RNA

SEQ ID NO: 25184 - RNA, 135 nt, synthetic construct; identical to SEQ ID NO: 24374
  source 1..135: mol_type = other RNA

SEQ ID NO: 25185 - RNA, 134 nt, synthetic construct; identical to SEQ ID NO: 24375
  source 1..134: mol_type = other RNA

SEQ ID NO: 25186 - RNA, 133 nt, synthetic construct; identical to SEQ ID NO: 24376
  source 1..133: mol_type = other RNA

SEQ ID NO: 25187 - RNA, 132 nt, synthetic construct; identical to SEQ ID NO: 24377
  source 1..132: mol_type = other RNA

SEQ ID NO: 25188 - RNA, 131 nt, synthetic construct; identical to SEQ ID NO: 24378
  source 1..131: mol_type = other RNA

SEQ ID NO: 25189 - RNA, 137 nt, synthetic construct; identical to SEQ ID NO: 24379
  source 1..137: mol_type = other RNA

SEQ ID NO: 25190 - RNA, 136 nt, synthetic construct; identical to SEQ ID NO: 24380
  source 1..136: mol_type = other RNA

SEQ ID NO: 25191 - RNA, 135 nt, synthetic construct; identical to SEQ ID NO: 24381
  source 1..135: mol_type = other RNA

SEQ ID NO: 25192 - RNA, 134 nt, synthetic construct; identical to SEQ ID NO: 24382
  source 1..134: mol_type = other RNA

SEQ ID NO: 25193 - RNA, 133 nt, synthetic construct; identical to SEQ ID NO: 24383
  source 1..133: mol_type = other RNA

SEQ ID NO: 25194 - RNA, 132 nt, synthetic construct; identical to SEQ ID NO: 24384
  source 1..132: mol_type = other RNA

SEQ ID NO: 25195 - RNA, 131 nt, synthetic construct; identical to SEQ ID NO: 24385
  source 1..131: mol_type = other RNA

SEQ ID NO: 25196 - RNA, 130 nt, synthetic construct; identical to SEQ ID NO: 24386
  source 1..130: mol_type = other RNA

SEQ ID NO: 25197 - RNA, 129 nt, synthetic construct; identical to SEQ ID NO: 24387
  source 1..129: mol_type = other RNA

SEQ ID NO: 25198 - RNA, 128 nt, synthetic construct; identical to SEQ ID NO: 24388
  source 1..128: mol_type = other RNA

SEQ ID NO: 25199 - RNA, 135 nt, synthetic construct; identical to SEQ ID NO: 24389
  source 1..135: mol_type = other RNA

SEQ ID NO: 25200 - RNA, 134 nt, synthetic construct; identical to SEQ ID NO: 24390
  source 1..134: mol_type = other RNA

SEQ ID NO: 25201 - RNA, 133 nt, synthetic construct; identical to SEQ ID NO: 24391
  source 1..133: mol_type = other RNA

SEQ ID NO: 25202 - RNA, 132 nt, synthetic construct; identical to SEQ ID NO: 24392
  source 1..132: mol_type = other RNA

SEQ ID NO: 25203 - RNA, 131 nt, synthetic construct; identical to SEQ ID NO: 24393
  source 1..131: mol_type = other RNA

SEQ ID NO: 25204 - RNA, 130 nt, synthetic construct; identical to SEQ ID NO: 24394
  source 1..130: mol_type = other RNA

SEQ ID NO: 25205 - RNA, 129 nt, synthetic construct; identical to SEQ ID NO: 24395
  source 1..129: mol_type = other RNA

SEQ ID NO: 25206 - RNA, 128 nt, synthetic construct; identical to SEQ ID NO: 24396
  source 1..128: mol_type = other RNA

SEQ ID NO: 25207 - RNA, 127 nt, synthetic construct; identical to SEQ ID NO: 24397
  source 1..127: mol_type = other RNA

SEQ ID NO: 25208 - RNA, 126 nt, synthetic construct; identical to SEQ ID NO: 24398
  source 1..126: mol_type = other RNA

SEQ ID NO: 25209 - RNA, 133 nt, synthetic construct; identical to SEQ ID NO: 24399
  source 1..133: mol_type = other RNA

SEQ ID NO: 25210 - RNA, 132 nt, synthetic construct; identical to SEQ ID NO: 24400
  source 1..132: mol_type = other RNA

SEQ ID NO: 25211 - RNA, 131 nt, synthetic construct; identical to SEQ ID NO: 24401
  source 1..131: mol_type = other RNA

SEQ ID NO: 25212 - RNA, 130 nt, synthetic construct; identical to SEQ ID NO: 24402
  source 1..130: mol_type = other RNA

SEQ ID NO: 25213 - RNA, 129 nt, synthetic construct; identical to SEQ ID NO: 24403
  source 1..129: mol_type = other RNA

SEQ ID NO: 25214 - RNA, 128 nt, synthetic construct; identical to SEQ ID NO: 24404
  source 1..128: mol_type = other RNA

SEQ ID NO: 25215 - RNA, 127 nt, synthetic construct; identical to SEQ ID NO: 24405
  source 1..127: mol_type = other RNA

SEQ ID NO: 25216 - RNA, 126 nt, synthetic construct; identical to SEQ ID NO: 24406
  source 1..126: mol_type = other RNA

SEQ ID NO: 25217 - RNA, 125 nt, synthetic construct; identical to SEQ ID NO: 24407
  source 1..125: mol_type = other RNA

SEQ ID NO: 25218 - RNA, 124 nt, synthetic construct; identical to SEQ ID NO: 24408
  source 1..124: mol_type = other RNA

SEQ ID NO: 25219 - RNA, 131 nt, synthetic construct; identical to SEQ ID NO: 24409
  source 1..131: mol_type = other RNA

SEQ ID NO: 25220 - RNA, 130 nt, synthetic construct; identical to SEQ ID NO: 24410
  source 1..130: mol_type = other RNA

SEQ ID NO: 25221 - RNA, 129 nt, synthetic construct; identical to SEQ ID NO: 24411
  source 1..129: mol_type = other RNA

SEQ ID NO: 25222 - RNA, 128 nt, synthetic construct; identical to SEQ ID NO: 24412
  source 1..128: mol_type = other RNA

SEQ ID NO: 25223 - RNA, 127 nt, synthetic construct; identical to SEQ ID NO: 24413
  source 1..127: mol_type = other RNA

SEQ ID NO: 25224 - RNA, 126 nt, synthetic construct; identical to SEQ ID NO: 24414
  source 1..126: mol_type = other RNA

SEQ ID NO: 25225 - RNA, 125 nt, synthetic construct; identical to SEQ ID NO: 24415
  source 1..125: mol_type = other RNA

SEQ ID NO: 25226 - RNA, 124 nt, synthetic construct; identical to SEQ ID NO: 24416
  source 1..124: mol_type = other RNA

SEQ ID NO: 25227 - RNA, 123 nt, synthetic construct; identical to SEQ ID NO: 24417
  source 1..123: mol_type = other RNA

SEQ ID NO: 25228 - RNA, 122 nt, synthetic construct; identical to SEQ ID NO: 24418
  source 1..122: mol_type = other RNA

SEQ ID NO: 25229 - RNA, 129 nt, synthetic construct; identical to SEQ ID NO: 24419
  source 1..129: mol_type = other RNA

SEQ ID NO: 25230 - RNA, 128 nt, synthetic construct; identical to SEQ ID NO: 24420
  source 1..128: mol_type = other RNA

SEQ ID NO: 25231 - RNA, 127 nt, synthetic construct; identical to SEQ ID NO: 24421
  source 1..127: mol_type = other RNA

SEQ ID NO: 25232 - RNA, 126 nt, synthetic construct; identical to SEQ ID NO: 24422
  source 1..126: mol_type = other RNA

SEQ ID NO: 25233 - RNA, 125 nt, synthetic construct; identical to SEQ ID NO: 24423
  source 1..125: mol_type = other RNA

SEQ ID NO: 25234 - RNA, 124 nt, synthetic construct; identical to SEQ ID NO: 24424
  source 1..124: mol_type = other RNA

SEQ ID NO: 25235 - RNA, 123 nt, synthetic construct; identical to SEQ ID NO: 24425
  source 1..123: mol_type = other RNA

SEQ ID NO: 25236 - RNA, 122 nt, synthetic construct; identical to SEQ ID NO: 24426
  source 1..122: mol_type = other RNA

SEQ ID NO: 25237 - RNA, 121 nt, synthetic construct; identical to SEQ ID NO: 24427
  source 1..121: mol_type = other RNA

SEQ ID NO: 25238 - RNA, 120 nt, synthetic construct; identical to SEQ ID NO: 24428
  source 1..120: mol_type = other RNA

SEQ ID NO: 25239 - RNA, 181 nt, synthetic construct; identical to SEQ ID NO: 24429
  source 1..181: mol_type = other RNA

SEQ ID NO: 25240 - RNA, 180 nt, synthetic construct; identical to SEQ ID NO: 24430
  source 1..180: mol_type = other RNA

SEQ ID NO: 25241 - RNA, 179 nt, synthetic construct; identical to SEQ ID NO: 24431
  source 1..179: mol_type = other RNA

SEQ ID NO: 25242 - RNA, 178 nt, synthetic construct; identical to SEQ ID NO: 24432
  source 1..178: mol_type = other RNA

SEQ ID NO: 25243 - RNA, 177 nt, synthetic construct; identical to SEQ ID NO: 24433
  source 1..177: mol_type = other RNA

SEQ ID NO: 25244 - RNA, 176 nt, synthetic construct; identical to SEQ ID NO: 24434
  source 1..176: mol_type = other RNA

SEQ ID NO: 25245 - RNA, 175 nt, synthetic construct; identical to SEQ ID NO: 24435
  source 1..175: mol_type = other RNA

SEQ ID NO: 25246 - RNA, 174 nt, synthetic construct; identical to SEQ ID NO: 24436
  source 1..174: mol_type = other RNA

SEQ ID NO: 25247 - RNA, 173 nt, synthetic construct; identical to SEQ ID NO: 24437
  source 1..173: mol_type = other RNA

SEQ ID NO: 25248 - RNA, 172 nt, synthetic construct; identical to SEQ ID NO: 24438
  source 1..172: mol_type = other RNA

SEQ ID NO: 25249 - RNA, 176 nt, synthetic construct; identical to SEQ ID NO: 24439
  source 1..176: mol_type = other RNA

SEQ ID NO: 25250 - RNA, 175 nt, synthetic construct; identical to SEQ ID NO: 24440
  source 1..175: mol_type = other RNA

SEQ ID NO: 25251 - RNA, 174 nt, synthetic construct; identical to SEQ ID NO: 24441
  source 1..174: mol_type = other RNA

SEQ ID NO: 25252 - RNA, 173 nt, synthetic construct; identical to SEQ ID NO: 24442
  source 1..173: mol_type = other RNA

SEQ ID NO: 25253 - RNA, 172 nt, synthetic construct; identical to SEQ ID NO: 24443
  source 1..172: mol_type = other RNA

SEQ ID NO: 25254 - RNA, 171 nt, synthetic construct; identical to SEQ ID NO: 24444
  source 1..171: mol_type = other RNA

SEQ ID NO: 25255 - RNA, 170 nt, synthetic construct; identical to SEQ ID NO: 24445
  source 1..170: mol_type = other RNA

SEQ ID NO: 25256 - RNA, 169 nt, synthetic construct; identical to SEQ ID NO: 24446
  source 1..169: mol_type = other RNA

SEQ ID NO: 25257 - RNA, 168 nt, synthetic construct; identical to SEQ ID NO: 24447
  source 1..168: mol_type = other RNA

SEQ ID NO: 25258 - RNA, 167 nt, synthetic construct; identical to SEQ ID NO: 24448
  source 1..167: mol_type = other RNA

SEQ ID NO: 25259 - RNA, 171 nt, synthetic construct; identical to SEQ ID NO: 24449
  source 1..171: mol_type = other RNA

SEQ ID NO: 25260 - RNA, 170 nt, synthetic construct; identical to SEQ ID NO: 24450
  source 1..170: mol_type = other RNA

SEQ ID NO: 25261 - RNA, 169 nt, synthetic construct; identical to SEQ ID NO: 24451
  source 1..169: mol_type = other RNA

SEQ ID NO: 25262 - RNA, 168 nt, synthetic construct; identical to SEQ ID NO: 24452
  source 1..168: mol_type = other RNA

SEQ ID NO: 25263 - RNA, 167 nt, synthetic construct; identical to SEQ ID NO: 24453
  source 1..167: mol_type = other RNA

SEQ ID NO: 25264 - RNA, 166 nt, synthetic construct; identical to SEQ ID NO: 24454
  source 1..166: mol_type = other RNA

SEQ ID NO: 25265 - RNA, 165 nt, synthetic construct; identical to SEQ ID NO: 24455
  source 1..165: mol_type = other RNA

SEQ ID NO: 25266 - RNA, 164 nt, synthetic construct; identical to SEQ ID NO: 24456
  source 1..164: mol_type = other RNA

SEQ ID NO: 25267 - RNA, 163 nt, synthetic construct; identical to SEQ ID NO: 24457
  source 1..163: mol_type = other RNA

SEQ ID NO: 25268 - RNA, 162 nt, synthetic construct; identical to SEQ ID NO: 24458
  source 1..162: mol_type = other RNA

SEQ ID NO: 25269 - RNA, 165 nt, synthetic construct; identical to SEQ ID NO: 24459
  source 1..165: mol_type = other RNA

SEQ ID NO: 25270 - RNA, 164 nt, synthetic construct; identical to SEQ ID NO: 24460
  source 1..164: mol_type = other RNA

SEQ ID NO: 25271 - RNA, 163 nt, synthetic construct; identical to SEQ ID NO: 24461
  source 1..163: mol_type = other RNA

SEQ ID NO: 25272 - RNA, 162 nt, synthetic construct; identical to SEQ ID NO: 24462
  source 1..162: mol_type = other RNA

SEQ ID NO: 25273 - RNA, 161 nt, synthetic construct; identical to SEQ ID NO: 24463
  source 1..161: mol_type = other RNA

SEQ ID NO: 25274 - RNA, 160 nt, synthetic construct; identical to SEQ ID NO: 24464
  source 1..160: mol_type = other RNA

SEQ ID NO: 25275 - RNA, 159 nt, synthetic construct; identical to SEQ ID NO: 24465
  source 1..159: mol_type = other RNA

SEQ ID NO: 25276 - RNA, 158 nt, synthetic construct; identical to SEQ ID NO: 24466
  source 1..158: mol_type = other RNA

SEQ ID NO: 25277 - RNA, 157 nt, synthetic construct; identical to SEQ ID NO: 24467
  source 1..157: mol_type = other RNA

SEQ ID NO: 25278 - RNA, 156 nt, synthetic construct; identical to SEQ ID NO: 24468
  source 1..156: mol_type = other RNA

SEQ ID NO: 25279 - RNA, 162 nt, synthetic construct; identical to SEQ ID NO: 24469
  source 1..162: mol_type = other RNA

SEQ ID NO: 25280 - RNA, 161 nt, synthetic construct; identical to SEQ ID NO: 24470
  source 1..161: mol_type = other RNA

SEQ ID NO: 25281 - RNA, 160 nt, synthetic construct; identical to SEQ ID NO: 24471
  source 1..160: mol_type = other RNA

SEQ ID NO: 25282 - RNA, 159 nt, synthetic construct; identical to SEQ ID NO: 24472
  source 1..159: mol_type = other RNA

SEQ ID NO: 25283 - RNA, 158 nt, synthetic construct; identical to SEQ ID NO: 24473
  source 1..158: mol_type = other RNA

SEQ ID NO: 25284 - RNA, 157 nt, synthetic construct; identical to SEQ ID NO: 24474
  source 1..157: mol_type = other RNA

SEQ ID NO: 25285 - RNA, 156 nt, synthetic construct; identical to SEQ ID NO: 24475
  source 1..156: mol_type = other RNA

SEQ ID NO: 25286 - RNA, 155 nt, synthetic construct; identical to SEQ ID NO: 24476
  source 1..155: mol_type = other RNA

SEQ ID NO: 25287 - RNA, 154 nt, synthetic construct; identical to SEQ ID NO: 24477
  source 1..154: mol_type = other RNA

SEQ ID NO: 25288 - RNA, 153 nt, synthetic construct; identical to SEQ ID NO: 24478
  source 1..153: mol_type = other RNA

SEQ ID NO: 25289 - RNA, 160 nt, synthetic construct; identical to SEQ ID NO: 24479
  source 1..160: mol_type = other RNA

SEQ ID NO: 25290 - RNA, 159 nt, synthetic construct; identical to SEQ ID NO: 24480
  source 1..159: mol_type = other RNA

SEQ ID NO: 25291 - RNA, 158 nt, synthetic construct; identical to SEQ ID NO: 24481
  source 1..158: mol_type = other RNA

SEQ ID NO: 25292 - RNA, 157 nt, synthetic construct; identical to SEQ ID NO: 24482
  source 1..157: mol_type = other RNA

SEQ ID NO: 25293 - RNA, 156 nt, synthetic construct; identical to SEQ ID NO: 24483
  source 1..156: mol_type = other RNA

SEQ ID NO: 25294 - RNA, 155 nt, synthetic construct; identical to SEQ ID NO: 24484
  source 1..155: mol_type = other RNA

SEQ ID NO: 25295 - RNA, 154 nt, synthetic construct; identical to SEQ ID NO: 24485
  source 1..154: mol_type = other RNA

SEQ ID NO: 25296 - RNA, 153 nt, synthetic construct; identical to SEQ ID NO: 24486
  source 1..153: mol_type = other RNA

SEQ ID NO: 25297 - RNA, 152 nt, synthetic construct; identical to SEQ ID NO: 24487
  source 1..152: mol_type = other RNA

SEQ ID NO: 25298 - RNA, 151 nt, synthetic construct; identical to SEQ ID NO: 24488
  source 1..151: mol_type = other RNA

SEQ ID NO: 25299 - RNA, 157 nt, synthetic construct; identical to SEQ ID NO: 24489
  source 1..157: mol_type = other RNA

SEQ ID NO: 25300 - RNA, 156 nt, synthetic construct; identical to SEQ ID NO: 24490
  source 1..156: mol_type = other RNA

SEQ ID NO: 25301 - RNA, 155 nt, synthetic construct; identical to SEQ ID NO: 24491
  source 1..155: mol_type = other RNA

SEQ ID NO: 25302 - RNA, 154 nt, synthetic construct; identical to SEQ ID NO: 24492
  source 1..154: mol_type = other RNA

SEQ ID NO: 25303 - RNA, 153 nt, synthetic construct; identical to SEQ ID NO: 24493
  source 1..153: mol_type = other RNA

SEQ ID NO: 25304 - RNA, 152 nt, synthetic construct; identical to SEQ ID NO: 24494
  source 1..152: mol_type = other RNA

SEQ ID NO: 25305 - RNA, 151 nt, synthetic construct; identical to SEQ ID NO: 24495
  source 1..151: mol_type = other RNA

SEQ ID NO: 25306 - RNA, 150 nt, synthetic construct; identical to SEQ ID NO: 24496
  source 1..150: mol_type = other RNA

SEQ ID NO: 25307 - RNA, 149 nt, synthetic construct; identical to SEQ ID NO: 24497
  source 1..149: mol_type = other RNA

SEQ ID NO: 25308 - RNA, 148 nt, synthetic construct; identical to SEQ ID NO: 24498
  source 1..148: mol_type = other RNA

SEQ ID NO: 25309 - RNA, 156 nt, synthetic construct; identical to SEQ ID NO: 24499
  source 1..156: mol_type = other RNA

SEQ ID NO: 25310 - RNA, 155 nt, synthetic construct; identical to SEQ ID NO: 24500
  source 1..155: mol_type = other RNA

SEQ ID NO: 25311 - RNA, 154 nt, synthetic construct; identical to SEQ ID NO: 24501
  source 1..154: mol_type = other RNA

SEQ ID NO: 25312 - RNA, 153 nt, synthetic construct; identical to SEQ ID NO: 24502
  source 1..153: mol_type = other RNA

SEQ ID NO: 25313 - RNA, 152 nt, synthetic construct; identical to SEQ ID NO: 24503
  source 1..152: mol_type = other RNA

SEQ ID NO: 25314 - RNA, 151 nt, synthetic construct; identical to SEQ ID NO: 24504
  source 1..151: mol_type = other RNA

SEQ ID NO: 25315 - RNA, 150 nt, synthetic construct; identical to SEQ ID NO: 24505
  source 1..150: mol_type = other RNA

SEQ ID NO: 25316 - RNA, 149 nt, synthetic construct; identical to SEQ ID NO: 24506
  source 1..149: mol_type = other RNA

SEQ ID NO: 25317 - RNA, 148 nt, synthetic construct; identical to SEQ ID NO: 24507
  source 1..148: mol_type = other RNA

SEQ ID NO: 25318 - RNA, 147 nt, synthetic construct; identical to SEQ ID NO: 24508
  source 1..147: mol_type = other RNA

SEQ ID NO: 25319 - RNA, 154 nt, synthetic construct; identical to SEQ ID NO: 24509
  source 1..154: mol_type = other RNA

SEQ ID NO: 25320 - RNA, 153 nt, synthetic construct; identical to SEQ ID NO: 24510
  source 1..153: mol_type = other RNA

SEQ ID NO: 25321 - RNA, 152 nt, synthetic construct; identical to SEQ ID NO: 24511
  source 1..152: mol_type = other RNA

SEQ ID NO: 25322 - RNA, 151 nt, synthetic construct; identical to SEQ ID NO: 24512
  source 1..151: mol_type = other RNA

SEQ ID NO: 25323 - RNA, 150 nt, synthetic construct; identical to SEQ ID NO: 24513
  source 1..150: mol_type = other RNA

SEQ ID NO: 25324 - RNA, 149 nt, synthetic construct; identical to SEQ ID NO: 24514
  source 1..149: mol_type = other RNA

SEQ ID NO: 25325 - RNA, 148 nt, synthetic construct; identical to SEQ ID NO: 24515
  source 1..148: mol_type = other RNA

SEQ ID NO: 25326 - RNA, 147 nt, synthetic construct; identical to SEQ ID NO: 24516
  source 1..147: mol_type = other RNA

SEQ ID NO: 25327 - RNA, 146 nt, synthetic construct; identical to SEQ ID NO: 24517
  source 1..146: mol_type = other RNA

SEQ ID NO: 25328 - RNA, 145 nt, synthetic construct; identical to SEQ ID NO: 24518
  source 1..145: mol_type = other RNA

SEQ ID NO: 25329 - RNA, 159 nt, synthetic construct; identical to SEQ ID NO: 24519
  source 1..159: mol_type = other RNA

SEQ ID NO: 25330 - RNA, 158 nt, synthetic construct; identical to SEQ ID NO: 24520
  source 1..158: mol_type = other RNA

SEQ ID NO: 25331 - RNA, 157 nt, synthetic construct; identical to SEQ ID NO: 24521
  source 1..157: mol_type = other RNA

SEQ ID NO: 25332 - RNA, 156 nt, synthetic construct; identical to SEQ ID NO: 24522
  source 1..156: mol_type = other RNA

SEQ ID NO: 25333 - RNA, 155 nt, synthetic construct; identical to SEQ ID NO: 24523
  source 1..155: mol_type = other RNA

SEQ ID NO: 25334 - RNA, 154 nt, synthetic construct; identical to SEQ ID NO: 24524
  source 1..154: mol_type = other RNA

SEQ ID NO: 25335 - RNA, 153 nt, synthetic construct; identical to SEQ ID NO: 24525
  source 1..153: mol_type = other RNA

SEQ ID NO: 25336 - RNA, 152 nt, synthetic construct; identical to SEQ ID NO: 24526
  source 1..152: mol_type = other RNA

SEQ ID NO: 25337 - RNA, 151 nt, synthetic construct; identical to SEQ ID NO: 24527
  source 1..151: mol_type = other RNA

SEQ ID NO: 25338 - RNA, 150 nt, synthetic construct; identical to SEQ ID NO: 24528
  source 1..150: mol_type = other RNA

SEQ ID NO: 25339 - RNA, 154 nt, synthetic construct; identical to SEQ ID NO: 24529
  source 1..154: mol_type = other RNA

SEQ ID NO: 25340 - RNA, 153 nt, synthetic construct; identical to SEQ ID NO: 24530
  source 1..153: mol_type = other RNA

SEQ ID NO: 25341 - RNA, 152 nt, synthetic construct; identical to SEQ ID NO: 24531
  source 1..152: mol_type = other RNA

SEQ ID NO: 25342 - RNA, 151 nt, synthetic construct; identical to SEQ ID NO: 24532
  source 1..151: mol_type = other RNA

SEQ ID NO: 25343 - RNA, 150 nt, synthetic construct; identical to SEQ ID NO: 24533
  source 1..150: mol_type = other RNA

SEQ ID NO: 25344 - RNA, 149 nt, synthetic construct; identical to SEQ ID NO: 24534
  source 1..149: mol_type = other RNA

SEQ ID NO: 25345 - RNA, 148 nt, synthetic construct; identical to SEQ ID NO: 24535
  source 1..148: mol_type = other RNA

SEQ ID NO: 25346 - RNA, 147 nt, synthetic construct; identical to SEQ ID NO: 24536
  source 1..147: mol_type = other RNA

SEQ ID NO: 25347 - RNA, 146 nt, synthetic construct; identical to SEQ ID NO: 24537
  source 1..146: mol_type = other RNA

SEQ ID NO: 25348 - RNA, 145 nt, synthetic construct; identical to SEQ ID NO: 24538
  source 1..145: mol_type = other RNA

SEQ ID NO: 25349 - RNA, 149 nt, synthetic construct; identical to SEQ ID NO: 24539
  source 1..149: mol_type = other RNA

SEQ ID NO: 25350 - RNA, 148 nt, synthetic construct; identical to SEQ ID NO: 24540
  source 1..148: mol_type = other RNA

SEQ ID NO: 25351 - RNA, 147 nt, synthetic construct; identical to SEQ ID NO: 24541
  source 1..147: mol_type = other RNA

SEQ ID NO: 25352 - RNA, 146 nt, synthetic construct; identical to SEQ ID NO: 24542
  source 1..146: mol_type = other RNA

SEQ ID NO: 25353 - RNA, 145 nt, synthetic construct; identical to SEQ ID NO: 24543
  source 1..145: mol_type = other RNA

SEQ ID NO: 25354 - RNA, 144 nt, synthetic construct; identical to SEQ ID NO: 24544
  source 1..144: mol_type = other RNA

SEQ ID NO: 25355 - RNA, 143 nt, synthetic construct; identical to SEQ ID NO: 24545
  source 1..143: mol_type = other RNA

SEQ ID NO: 25356 - RNA, 142 nt, synthetic construct; identical to SEQ ID NO: 24546
  source 1..142: mol_type = other RNA

SEQ ID NO: 25357 - RNA, 141 nt, synthetic construct; identical to SEQ ID NO: 24547
  source 1..141: mol_type = other RNA

SEQ ID NO: 25358 - RNA, 140 nt, synthetic construct; identical to SEQ ID NO: 24548
  source 1..140: mol_type = other RNA

SEQ ID NO: 25359 - RNA, 143 nt, synthetic construct; identical to SEQ ID NO: 24549
  source 1..143: mol_type = other RNA

SEQ ID NO: 25360 - RNA, 142 nt, synthetic construct; identical to SEQ ID NO: 24550
  source 1..142: mol_type = other RNA

SEQ ID NO: 25361 - RNA, 141 nt, synthetic construct; identical to SEQ ID NO: 24551
  source 1..141: mol_type = other RNA

SEQ ID NO: 25362 - RNA, 140 nt, synthetic construct; identical to SEQ ID NO: 24552
  source 1..140: mol_type = other RNA

SEQ ID NO: 25363 - RNA, 139 nt, synthetic construct; identical to SEQ ID NO: 24553
  source 1..139: mol_type = other RNA

SEQ ID NO: 25364 - RNA, 138 nt, synthetic construct; identical to SEQ ID NO: 24554
  source 1..138: mol_type = other RNA

SEQ ID NO: 25365 - RNA, 137 nt, synthetic construct; identical to SEQ ID NO: 24555
  source 1..137: mol_type = other RNA

SEQ ID NO: 25366 - RNA, 136 nt, synthetic construct; identical to SEQ ID NO: 24556
  source 1..136: mol_type = other RNA

SEQ ID NO: 25367 - RNA, 135 nt, synthetic construct; identical to SEQ ID NO: 24557
  source 1..135: mol_type = other RNA

SEQ ID NO: 25368 - RNA, 134 nt, synthetic construct; identical to SEQ ID NO: 24558
  source 1..134: mol_type = other RNA

SEQ ID NO: 25369 - RNA, 140 nt, synthetic construct; identical to SEQ ID NO: 24559
  source 1..140: mol_type = other RNA

SEQ ID NO: 25370 - RNA, 139 nt, synthetic construct; identical to SEQ ID NO: 24560
  source 1..139: mol_type = other RNA

SEQ ID NO: 25371 - RNA, 138 nt, synthetic construct; identical to SEQ ID NO: 24561
  source 1..138: mol_type = other RNA

SEQ ID NO: 25372 - RNA, 137 nt, synthetic construct; identical to SEQ ID NO: 24562
  source 1..137: mol_type = other RNA

SEQ ID NO: 25373 - RNA, 136 nt, synthetic construct; identical to SEQ ID NO: 24563
  source 1..136: mol_type = other RNA

SEQ ID NO: 25374 - RNA, 135 nt, synthetic construct; identical to SEQ ID NO: 24564
  source 1..135: mol_type = other RNA

SEQ ID NO: 25375 - RNA, 134 nt, synthetic construct; identical to SEQ ID NO: 24565
  source 1..134: mol_type = other RNA

SEQ ID NO: 25376 - RNA, 133 nt, synthetic construct; identical to SEQ ID NO: 24566
  source 1..133: mol_type = other RNA

SEQ ID NO: 25377 - RNA, 132 nt, synthetic construct; identical to SEQ ID NO: 24567
  source 1..132: mol_type = other RNA

SEQ ID NO: 25378 - RNA, 131 nt, synthetic construct; identical to SEQ ID NO: 24568
  source 1..131: mol_type = other RNA

SEQ ID NO: 25379 - RNA, 138 nt, synthetic construct; identical to SEQ ID NO: 24569
  source 1..138: mol_type = other RNA

SEQ ID NO: 25380 - RNA, 137 nt, synthetic construct; identical to SEQ ID NO: 24570
  source 1..137: mol_type = other RNA

SEQ ID NO: 25381 - RNA, 136 nt, synthetic construct; identical to SEQ ID NO: 24571
  source 1..136: mol_type = other RNA

SEQ ID NO: 25382 - RNA, 135 nt, synthetic construct; identical to SEQ ID NO: 24572
  source 1..135: mol_type = other RNA

SEQ ID NO: 25383 - RNA, 134 nt, synthetic construct; identical to SEQ ID NO: 24573
  source 1..134: mol_type = other RNA

SEQ ID NO: 25384 - RNA, 133 nt, synthetic construct; identical to SEQ ID NO: 24574
  source 1..133: mol_type = other RNA

SEQ ID NO: 25385 - RNA, 132 nt, synthetic construct; identical to SEQ ID NO: 24575
  source 1..132: mol_type = other RNA

SEQ ID NO: 25386 - RNA, 131 nt, synthetic construct; identical to SEQ ID NO: 24576
  source 1..131: mol_type = other RNA

SEQ ID NO: 25387 - RNA, 130 nt, synthetic construct; identical to SEQ ID NO: 24577
  source 1..130: mol_type = other RNA

SEQ ID NO: 25388 - RNA, 129 nt, synthetic construct; identical to SEQ ID NO: 24578
  source 1..129: mol_type = other RNA

SEQ ID NO: 25389 - RNA, 136 nt, synthetic construct; identical to SEQ ID NO: 24579
  source 1..136: mol_type = other RNA

SEQ ID NO: 25390 - RNA, 135 nt, synthetic construct; identical to SEQ ID NO: 24580
  source 1..135: mol_type = other RNA

SEQ ID NO: 25391 - RNA, 134 nt, synthetic construct; identical to SEQ ID NO: 24581
  source 1..134: mol_type = other RNA

SEQ ID NO: 25392 - RNA, 133 nt, synthetic construct; identical to SEQ ID NO: 24582
  source 1..133: mol_type = other RNA

SEQ ID NO: 25393 - RNA, 132 nt, synthetic construct; identical to SEQ ID NO: 24583
  source 1..132: mol_type = other RNA

SEQ ID NO: 25394 - RNA, 131 nt, synthetic construct; identical to SEQ ID NO: 24584
  source 1..131: mol_type = other RNA

SEQ ID NO: 25395 - RNA, 130 nt, synthetic construct; identical to SEQ ID NO: 24585
  source 1..130: mol_type = other RNA

SEQ ID NO: 25396 - RNA, 129 nt, synthetic construct; identical to SEQ ID NO: 24586
  source 1..129: mol_type = other RNA

SEQ ID NO: 25397 - RNA, 128 nt, synthetic construct; identical to SEQ ID NO: 24587
  source 1..128: mol_type = other RNA

SEQ ID NO: 25398 - RNA, 127 nt, synthetic construct; identical to SEQ ID NO: 24588
  source 1..127: mol_type = other RNA

SEQ ID NO: 25399 - RNA, 134 nt, synthetic construct; identical to SEQ ID NO: 24589
  source 1..134: mol_type = other RNA

SEQ ID NO: 25400 - RNA, 133 nt, synthetic construct; identical to SEQ ID NO: 24590
  source 1..133: mol_type = other RNA

SEQ ID NO: 25401 - RNA, 132 nt, synthetic construct; identical to SEQ ID NO: 24591
  source 1..132: mol_type = other RNA

SEQ ID NO: 25402 - RNA, 131 nt, synthetic construct; identical to SEQ ID NO: 24592
  source 1..131: mol_type = other RNA

SEQ ID NO: 25403 - RNA, 130 nt, synthetic construct; identical to SEQ ID NO: 24593
  source 1..130: mol_type = other RNA

SEQ ID NO: 25404 - RNA, 129 nt, synthetic construct; identical to SEQ ID NO: 24594
  source 1..129: mol_type = other RNA

SEQ ID NO: 25405 - RNA, 128 nt, synthetic construct; identical to SEQ ID NO: 24595
  source 1..128: mol_type = other RNA

SEQ ID NO: 25406 - RNA, 127 nt, synthetic construct; identical to SEQ ID NO: 24596
  source 1..127: mol_type = other RNA

SEQ ID NO: 25407 - RNA, 126 nt, synthetic construct; identical to SEQ ID NO: 24597
  source 1..126: mol_type = other RNA

SEQ ID NO: 25408 - RNA, 125 nt, synthetic construct; identical to SEQ ID NO: 24598
  source 1..125: mol_type = other RNA

SEQ ID NO: 25409 - RNA, 132 nt, synthetic construct; identical to SEQ ID NO: 24599
  source 1..132: mol_type = other RNA

SEQ ID NO: 25410 - RNA, 131 nt, synthetic construct; identical to SEQ ID NO: 24600
  source 1..131: mol_type = other RNA

SEQ ID NO: 25411 - RNA, 130 nt, synthetic construct; identical to SEQ ID NO: 24601
  source 1..130: mol_type = other RNA

SEQ ID NO: 25412 - RNA, 129 nt, synthetic construct; identical to SEQ ID NO: 24602
  source 1..129: mol_type = other RNA

SEQ ID NO: 25413 - RNA, 128 nt, synthetic construct; identical to SEQ ID NO: 24603
  source 1..128: mol_type = other RNA

SEQ ID NO: 25414 - RNA, 127 nt, synthetic construct; identical to SEQ ID NO: 24604
  source 1..127: mol_type = other RNA

SEQ ID NO: 25415 - RNA, 126 nt, synthetic construct; identical to SEQ ID NO: 24605
  source 1..126: mol_type = other RNA

SEQ ID NO: 25416 - RNA, 125 nt, synthetic construct; identical to SEQ ID NO: 24606
  source 1..125: mol_type = other RNA

SEQ ID NO: 25417 - RNA, 124 nt, synthetic construct; identical to SEQ ID NO: 24607
  source 1..124: mol_type = other RNA

SEQ ID NO: 25418 - RNA, 123 nt, synthetic construct; identical to SEQ ID NO: 24608
  source 1..123: mol_type = other RNA

SEQ ID NO: 25419 - RNA, 181 nt, synthetic construct; identical to SEQ ID NO: 24609
  source 1..181: mol_type = other RNA

SEQ ID NO: 25420 - RNA, 180 nt, synthetic construct; identical to SEQ ID NO: 24610
  source 1..180: mol_type = other RNA

SEQ ID NO: 25421 - RNA, 179 nt, synthetic construct; identical to SEQ ID NO: 24611
  source 1..179: mol_type = other RNA

SEQ ID NO: 25422 - RNA, 178 nt, synthetic construct; identical to SEQ ID NO: 24612
  source 1..178: mol_type = other RNA

SEQ ID NO: 25423 - RNA, 177 nt, synthetic construct; identical to SEQ ID NO: 24613
  source 1..177: mol_type = other RNA

SEQ ID NO: 25424 - RNA, 176 nt, synthetic construct; identical to SEQ ID NO: 24614
  source 1..176: mol_type = other RNA

SEQ ID NO: 25425 - RNA, 175 nt, synthetic construct; identical to SEQ ID NO: 24615
  source 1..175: mol_type = other RNA

SEQ ID NO: 25426 - RNA, 174 nt, synthetic construct; identical to SEQ ID NO: 24616
  source 1..174: mol_type = other RNA

SEQ ID NO: 25427 - RNA, 173 nt, synthetic construct; identical to SEQ ID NO: 24617
  source 1..173: mol_type = other RNA

SEQ ID NO: 25428 - RNA, 172 nt, synthetic construct; identical to SEQ ID NO: 24618
  source 1..172: mol_type = other RNA

SEQ ID NO: 25429 - RNA, 176 nt, synthetic construct; identical to SEQ ID NO: 24619
  source 1..176: mol_type = other RNA

SEQ ID NO: 25430 - RNA, 175 nt, synthetic construct; identical to SEQ ID NO: 24620
  source 1..175: mol_type = other RNA

SEQ ID NO: 25431 - RNA, 174 nt, synthetic construct; identical to SEQ ID NO: 24621
  source 1..174: mol_type = other RNA

SEQ ID NO: 25432 - RNA, 173 nt, synthetic construct; identical to SEQ ID NO: 24622
  source 1..173: mol_type = other RNA

SEQ ID NO: 25433 - RNA, 172 nt, synthetic construct; identical to SEQ ID NO: 24623
  source 1..172: mol_type = other RNA

SEQ ID NO: 25434 - RNA, 171 nt, synthetic construct; identical to SEQ ID NO: 24624
  source 1..171: mol_type = other RNA

SEQ ID NO: 25435 - RNA, 170 nt, synthetic construct; identical to SEQ ID NO: 24625
  source 1..170: mol_type = other RNA

SEQ ID NO: 25436 - RNA, 169 nt, synthetic construct; identical to SEQ ID NO: 24626
  source 1..169: mol_type = other RNA

SEQ ID NO: 25437 - RNA, 168 nt, synthetic construct; identical to SEQ ID NO: 24627
  source 1..168: mol_type = other RNA

SEQ ID NO: 25438 - RNA, 167 nt, synthetic construct; identical to SEQ ID NO: 24628
  source 1..167: mol_type = other RNA

SEQ ID NO: 25439 - RNA, 171 nt, synthetic construct; identical to SEQ ID NO: 24629
  source 1..171: mol_type = other RNA

SEQ ID NO: 25440 - RNA, 170 nt, synthetic construct; identical to SEQ ID NO: 24630
  source 1..170: mol_type = other RNA

SEQ ID NO: 25441 - RNA, 169 nt, synthetic construct; identical to SEQ ID NO: 24631
  source 1..169: mol_type = other RNA

SEQ ID NO: 25442 - RNA, 168 nt, synthetic construct; identical to SEQ ID NO: 24632
  source 1..168: mol_type = other RNA

SEQ ID NO: 25443 - RNA, 167 nt, synthetic construct; identical to SEQ ID NO: 24633
  source 1..167: mol_type = other RNA

SEQ ID NO: 25444 - RNA, 166 nt, synthetic construct; identical to SEQ ID NO: 24634
  source 1..166: mol_type = other RNA

SEQ ID NO: 25445 - RNA, 165 nt, synthetic construct; identical to SEQ ID NO: 24635
  source 1..165: mol_type = other RNA

SEQ ID NO: 25446 - RNA, 164 nt, synthetic construct; identical to SEQ ID NO: 24636
  source 1..164: mol_type = other RNA

SEQ ID NO: 25447 - RNA, 163 nt, synthetic construct; identical to SEQ ID NO: 24637
  source 1..163: mol_type = other RNA

SEQ ID NO: 25448 - RNA, 162 nt, synthetic construct; identical to SEQ ID NO: 24638
  source 1..162: mol_type = other RNA

SEQ ID NO: 25449 - RNA, 165 nt, synthetic construct; identical to SEQ ID NO: 24639
  source 1..165: mol_type = other RNA

SEQ ID NO: 25450 - RNA, 164 nt, synthetic construct; identical to SEQ ID NO: 24640
  source 1..164: mol_type = other RNA

SEQ ID NO: 25451 - RNA, 163 nt, synthetic construct; identical to SEQ ID NO: 24641
  source 1..163: mol_type = other RNA

SEQ ID NO: 25452 - RNA, 162 nt, synthetic construct; identical to SEQ ID NO: 24642
  source 1..162: mol_type = other RNA

SEQ ID NO: 25453 - RNA, 161 nt, synthetic construct; identical to SEQ ID NO: 24643
  source 1..161: mol_type = other RNA

SEQ ID NO: 25454 - RNA, 160 nt, synthetic construct; identical to SEQ ID NO: 24644
  source 1..160: mol_type = other RNA

SEQ ID NO: 25455 - RNA, 159 nt, synthetic construct; identical to SEQ ID NO: 24645
  source 1..159: mol_type = other RNA

SEQ ID NO: 25456 - RNA, 158 nt, synthetic construct; identical to SEQ ID NO: 24646
  source 1..158: mol_type = other RNA

SEQ ID NO: 25457 - RNA, 157 nt, synthetic construct; identical to SEQ ID NO: 24647
  source 1..157: mol_type = other RNA

SEQ ID NO: 25458 - RNA, 156 nt, synthetic construct; identical to SEQ ID NO: 24648
  source 1..156: mol_type = other RNA

SEQ ID NO: 25459 - RNA, 162 nt, synthetic construct; identical to SEQ ID NO: 24649
  source 1..162: mol_type = other RNA

SEQ ID NO: 25460 - RNA, 161 nt, synthetic construct; identical to SEQ ID NO: 24650
  source 1..161: mol_type = other RNA

SEQ ID NO: 25461 - RNA, 160 nt, synthetic construct; identical to SEQ ID NO: 24651
  source 1..160: mol_type = other RNA

SEQ ID NO: 25462 - RNA, 159 nt, synthetic construct; identical to SEQ ID NO: 24652
  source 1..159: mol_type = other RNA

SEQ ID NO: 25463 - RNA, 158 nt, synthetic construct; identical to SEQ ID NO: 24653
  source 1..158: mol_type = other RNA

SEQ ID NO: 25464 - RNA, 157 nt, synthetic construct; identical to SEQ ID NO: 24654
  source 1..157: mol_type = other RNA

SEQ ID NO: 25465 - RNA, 156 nt, synthetic construct; identical to SEQ ID NO: 24655
  source 1..156: mol_type = other RNA

SEQ ID NO: 25466 - RNA, 155 nt, synthetic construct; identical to SEQ ID NO: 24656
  source 1..155: mol_type = other RNA

SEQ ID NO: 25467 - RNA, 154 nt, synthetic construct; identical to SEQ ID NO: 24657
  source 1..154: mol_type = other RNA

SEQ ID NO: 25468 - RNA, 153 nt, synthetic construct; identical to SEQ ID NO: 24658
  source 1..153: mol_type = other RNA

SEQ ID NO: 25469 - RNA, 160 nt, synthetic construct; identical to SEQ ID NO: 24659
  source 1..160: mol_type = other RNA

SEQ ID NO: 25470 - RNA, 159 nt, synthetic construct; identical to SEQ ID NO: 24660
  source 1..159: mol_type = other RNA

SEQ ID NO: 25471 - RNA, 158 nt, synthetic construct; identical to SEQ ID NO: 24661
  source 1..158: mol_type = other RNA

SEQ ID NO: 25472 - RNA, 157 nt, synthetic construct; identical to SEQ ID NO: 24662
  source 1..157: mol_type = other RNA

SEQ ID NO: 25473 - RNA, 156 nt, synthetic construct; identical to SEQ ID NO: 24663
  source 1..156: mol_type = other RNA

SEQ ID NO: 25474 - RNA, 155 nt, synthetic construct; identical to SEQ ID NO: 24664
  source 1..155: mol_type = other RNA

SEQ ID NO: 25475 - RNA, 154 nt, synthetic construct; identical to SEQ ID NO: 24665
  source 1..154: mol_type = other RNA

SEQ ID NO: 25476 - RNA, 153 nt, synthetic construct; identical to SEQ ID NO: 24666
  source 1..153: mol_type = other RNA

SEQ ID NO: 25477 - RNA, 152 nt, synthetic construct; identical to SEQ ID NO: 24667
  source 1..152: mol_type = other RNA

SEQ ID NO: 25478 - RNA, 151 nt, synthetic construct; identical to SEQ ID NO: 24668
  source 1..151: mol_type = other RNA

SEQ ID NO: 25479 - RNA, 158 nt, synthetic construct; identical to SEQ ID NO: 24669
  source 1..158: mol_type = other RNA

SEQ ID NO: 25480 - RNA, 157 nt, synthetic construct; identical to SEQ ID NO: 24670
  source 1..157: mol_type = other RNA

SEQ ID NO: 25481 - RNA, 156 nt, synthetic construct; identical to SEQ ID NO: 24671
  source 1..156: mol_type = other RNA

SEQ ID NO: 25482 - RNA, 155 nt, synthetic construct; identical to SEQ ID NO: 24672
  source 1..155: mol_type = other RNA

SEQ ID NO: 25483 - RNA, 154 nt, synthetic construct; identical to SEQ ID NO: 24673
  source 1..154: mol_type = other RNA

SEQ ID NO: 25484 - RNA, 153 nt, synthetic construct; identical to SEQ ID NO: 24674
  source 1..153: mol_type = other RNA

SEQ ID NO: 25485 - RNA, 152 nt, synthetic construct; identical to SEQ ID NO: 24675
  source 1..152: mol_type = other RNA

SEQ ID NO: 25486 - RNA, 151 nt, synthetic construct; identical to SEQ ID NO: 24676
  source 1..151: mol_type = other RNA

SEQ ID NO: 25487 - RNA, 150 nt, synthetic construct; identical to SEQ ID NO: 24677
  source 1..150: mol_type = other RNA

SEQ ID NO: 25488 - RNA, 149 nt, synthetic construct; identical to SEQ ID NO: 24678
  source 1..149: mol_type = other RNA

SEQ ID NO: 25489 - RNA, 156 nt, synthetic construct; identical to SEQ ID NO: 24679
  source 1..156: mol_type = other RNA

SEQ ID NO: 25490 - RNA, 155 nt, synthetic construct; identical to SEQ ID NO: 24680
  source 1..155: mol_type = other RNA

SEQ ID NO: 25491 - RNA, 154 nt, synthetic construct; identical to SEQ ID NO: 24681
  source 1..154: mol_type = other RNA

SEQ ID NO: 25492 - RNA, 153 nt, synthetic construct; identical to SEQ ID NO: 24682
  source 1..153: mol_type = other RNA

SEQ ID NO: 25493 - RNA, 152 nt, synthetic construct; identical to SEQ ID NO: 24683
  source 1..152: mol_type = other RNA

SEQ ID NO: 25494 - RNA, 151 nt, synthetic construct; identical to SEQ ID NO: 24684
  source 1..151: mol_type = other RNA

SEQ ID NO: 25495 - RNA, 150 nt, synthetic construct; identical to SEQ ID NO: 24685
  source 1..150: mol_type = other RNA

SEQ ID NO: 25496 - RNA, 149 nt, synthetic construct; identical to SEQ ID NO: 24686
  source 1..149: mol_type = other RNA

SEQ ID NO: 25497 - RNA, 148 nt, synthetic construct; identical to SEQ ID NO: 24687
  source 1..148: mol_type = other RNA

SEQ ID NO: 25498 - RNA, 147 nt, synthetic construct; identical to SEQ ID NO: 24688
  source 1..147: mol_type = other RNA

SEQ ID NO: 25499 - RNA, 154 nt, synthetic construct; identical to SEQ ID NO: 24689
  source 1..154: mol_type = other RNA

SEQ ID NO: 25500 - RNA, 153 nt, synthetic construct; identical to SEQ ID NO: 24690
  source 1..153: mol_type = other RNA

SEQ ID NO: 25501 - RNA, 152 nt, synthetic construct; identical to SEQ ID NO: 24691
  source 1..152: mol_type = other RNA

SEQ ID NO: 25502 - RNA, 151 nt, synthetic construct; identical to SEQ ID NO: 24692
  source 1..151: mol_type = other RNA

SEQ ID NO: 25503 - RNA, 150 nt, synthetic construct; identical to SEQ ID NO: 24693
  source 1..150: mol_type = other RNA

SEQ ID NO: 25504 - RNA, 149 nt, synthetic construct; identical to SEQ ID NO: 24694
  source 1..149: mol_type = other RNA

SEQ ID NO: 25505 - RNA, 148 nt, synthetic construct; identical to SEQ ID NO: 24695
  source 1..148: mol_type = other RNA

SEQ ID NO: 25506 - RNA, 147 nt, synthetic construct; identical to SEQ ID NO: 24696
  source 1..147: mol_type = other RNA

SEQ ID NO: 25507 - RNA, 146 nt, synthetic construct; identical to SEQ ID NO: 24697
  source 1..146: mol_type = other RNA

SEQ ID NO: 25508 - RNA, 145 nt, synthetic construct; identical to SEQ ID NO: 24698
  source 1..145: mol_type = other RNA

SEQ ID NO: 25509 - RNA, 161 nt, synthetic construct; identical to SEQ ID NO: 24699
  source 1..161: mol_type = other RNA

SEQ ID NO: 25510 - RNA, 160 nt, synthetic construct; identical to SEQ ID NO: 24700
  source 1..160: mol_type = other RNA

SEQ ID NO: 25511 - RNA, 159 nt, synthetic construct; identical to SEQ ID NO: 24701
  source 1..159: mol_type = other RNA

SEQ ID NO: 25512 - RNA, 158 nt, synthetic construct; identical to SEQ ID NO: 24702
  source 1..158: mol_type = other RNA

SEQ ID NO: 25513 - RNA, 157 nt, synthetic construct; identical to SEQ ID NO: 24703
  source 1..157: mol_type = other RNA

SEQ ID NO: 25514 - RNA, 156 nt, synthetic construct; identical to SEQ ID NO: 24704
  source 1..156: mol_type = other RNA

SEQ ID NO: 25515 - RNA, 155 nt, synthetic construct; identical to SEQ ID NO: 24705
  source 1..155: mol_type = other RNA

SEQ ID NO: 25516 - RNA, 154 nt, synthetic construct; identical to SEQ ID NO: 24706
  source 1..154: mol_type = other RNA

SEQ ID NO: 25517 - RNA, 153 nt, synthetic construct; identical to SEQ ID NO: 24707
  source 1..153: mol_type = other RNA

SEQ ID NO: 25518 - RNA, 152 nt, synthetic construct; identical to SEQ ID NO: 24708
  source 1..152: mol_type = other RNA

SEQ ID NO: 25519 - RNA, 156 nt, synthetic construct; identical to SEQ ID NO: 24709
  source 1..156: mol_type = other RNA

SEQ ID NO: 25520 - RNA, 155 nt, synthetic construct; identical to SEQ ID NO: 24710
  source 1..155: mol_type = other RNA

SEQ ID NO: 25521 - RNA, 154 nt, synthetic construct; identical to SEQ ID NO: 24711
  source 1..154: mol_type = other RNA

SEQ ID NO: 25522 - RNA, 153 nt, synthetic construct; identical to SEQ ID NO: 24712
  source 1..153: mol_type = other RNA

SEQ ID NO: 25523 - RNA, 152 nt, synthetic construct; identical to SEQ ID NO: 24713
  source 1..152: mol_type = other RNA

SEQ ID NO: 25524 - RNA, 151 nt, synthetic construct; identical to SEQ ID NO: 24714
  source 1..151: mol_type = other RNA

SEQ ID NO: 25525 - RNA, 150 nt, synthetic construct; identical to SEQ ID NO: 24715
  source 1..150: mol_type = other RNA

SEQ ID NO: 25526 - RNA, 149 nt, synthetic construct; identical to SEQ ID NO: 24716
  source 1..149: mol_type = other RNA

SEQ ID NO: 25527 - RNA, 148 nt, synthetic construct; identical to SEQ ID NO: 24717
  source 1..148: mol_type = other RNA

SEQ ID NO: 25528 - RNA, 147 nt, synthetic construct; identical to SEQ ID NO: 24718
  source 1..147: mol_type = other RNA

SEQ ID NO: 25529 - RNA, 151 nt, synthetic construct; identical to SEQ ID NO: 24719
  source 1..151: mol_type = other RNA

SEQ ID NO: 25530 - RNA, 150 nt, synthetic construct; identical to SEQ ID NO: 24720
  source 1..150: mol_type = other RNA

SEQ ID NO: 25531 - RNA, 149 nt, synthetic construct; identical to SEQ ID NO: 24721
  source 1..149: mol_type = other RNA

SEQ ID NO: 25532 - RNA, 148 nt, synthetic construct; identical to SEQ ID NO: 24722
  source 1..148: mol_type = other RNA

SEQ ID NO: 25533 - RNA, 147 nt, synthetic construct; identical to SEQ ID NO: 24723
  source 1..147: mol_type = other RNA

SEQ ID NO: 25534 - RNA, 146 nt, synthetic construct; identical to SEQ ID NO: 24724
  source 1..146: mol_type = other RNA

SEQ ID NO: 25535 - RNA, 145 nt, synthetic construct; identical to SEQ ID NO: 24725
  source 1..145: mol_type = other RNA

SEQ ID NO: 25536 - RNA, 144 nt, synthetic construct; identical to SEQ ID NO: 24726
  source 1..144: mol_type = other RNA

SEQ ID NO: 25537 - RNA, 143 nt, synthetic construct; identical to SEQ ID NO: 24727
  source 1..143: mol_type = other RNA

SEQ ID NO: 25538 - RNA, 142 nt, synthetic construct; identical to SEQ ID NO: 24728
  source 1..142: mol_type = other RNA

SEQ ID NO: 25539 - RNA, 145 nt, synthetic construct; identical to SEQ ID NO: 24729
  source 1..145: mol_type = other RNA

SEQ ID NO: 25540 - RNA, 144 nt, synthetic construct; identical to SEQ ID NO: 24730
  source 1..144: mol_type = other RNA

SEQ ID NO: 25541 - RNA, 143 nt, synthetic construct; identical to SEQ ID NO: 24731
  source 1..143: mol_type = other RNA

SEQ ID NO: 25542 - RNA, 142 nt, synthetic construct; identical to SEQ ID NO: 24732
  source 1..142: mol_type = other RNA

SEQ ID NO: 25543 - RNA, 141 nt, synthetic construct; identical to SEQ ID NO: 24733
  source 1..141: mol_type = other RNA

SEQ ID NO: 25544 - RNA, 140 nt, synthetic construct; identical to SEQ ID NO: 24734
  source 1..140: mol_type = other RNA

SEQ ID NO: 25545 - RNA, 139 nt, synthetic construct; identical to SEQ ID NO: 24735
  source 1..139: mol_type = other RNA

SEQ ID NO: 25546 - RNA, 138 nt, synthetic construct; identical to SEQ ID NO: 24736
  source 1..138: mol_type = other RNA

SEQ ID NO: 25547 - RNA, 137 nt, synthetic construct; identical to SEQ ID NO: 24737
  source 1..137: mol_type = other RNA

SEQ ID NO: 25548 - RNA, 136 nt, synthetic construct; identical to SEQ ID NO: 24738
  source 1..136: mol_type = other RNA

SEQ ID NO: 25549 - RNA, 142 nt, synthetic construct; identical to SEQ ID NO: 24739
  source 1..142: mol_type = other RNA

SEQ ID NO: 25550 - RNA, 141 nt, synthetic construct; identical to SEQ ID NO: 24740
  source 1..141: mol_type = other RNA

SEQ ID NO: 25551 - RNA, 140 nt, synthetic construct; identical to SEQ ID NO: 24741
  source 1..140: mol_type = other RNA

SEQ ID NO: 25552 - RNA, 139 nt, synthetic construct; identical to SEQ ID NO: 24742
  source 1..139: mol_type = other RNA

SEQ ID NO: 25553 - RNA, 138 nt, synthetic construct; identical to SEQ ID NO: 24743
  source 1..138: mol_type = other RNA

SEQ ID NO: 25554 - RNA, 137 nt, synthetic construct; identical to SEQ ID NO: 24744
  source 1..137: mol_type = other RNA

SEQ ID NO: 25555 - RNA, 136 nt, synthetic construct; identical to SEQ ID NO: 24745
  source 1..136: mol_type = other RNA

SEQ ID NO: 25556 - RNA, 135 nt, synthetic construct; identical to SEQ ID NO: 24746
  source 1..135: mol_type = other RNA

SEQ ID NO: 25557 - RNA, 134 nt, synthetic construct; identical to SEQ ID NO: 24747
  source 1..134: mol_type = other RNA

SEQ ID NO: 25558 - RNA, 133 nt, synthetic construct; identical to SEQ ID NO: 24748
  source 1..133: mol_type = other RNA

SEQ ID NO: 25559 - RNA, 140 nt, synthetic construct; identical to SEQ ID NO: 24749
  source 1..140: mol_type = other RNA

SEQ ID NO: 25560 - RNA, 139 nt, synthetic construct; identical to SEQ ID NO: 24750
  source 1..139: mol_type = other RNA

SEQ ID NO: 25561 - RNA, 138 nt, synthetic construct; identical to SEQ ID NO: 24751
  source 1..138: mol_type = other RNA

SEQ ID NO: 25562 - RNA, 137 nt, synthetic construct; identical to SEQ ID NO: 24752
  source 1..137: mol_type = other RNA

SEQ ID NO: 25563 - RNA, 136 nt, synthetic construct; identical to SEQ ID NO: 24753
  source 1..136: mol_type = other RNA

SEQ ID NO: 25564 - RNA, 135 nt, synthetic construct; identical to SEQ ID NO: 24754
  source 1..135: mol_type = other RNA

SEQ ID NO: 25565 - RNA, 134 nt, synthetic construct; identical to SEQ ID NO: 24755
  source 1..134: mol_type = other RNA

SEQ ID NO: 25566 - RNA, 133 nt, synthetic construct; identical to SEQ ID NO: 24756
  source 1..133: mol_type = other RNA

SEQ ID NO: 25567 - RNA, 132 nt, synthetic construct; identical to SEQ ID NO: 24757
  source 1..132: mol_type = other RNA

SEQ ID NO: 25568 - RNA, 131 nt, synthetic construct; identical to SEQ ID NO: 24758
  source 1..131: mol_type = other RNA

SEQ ID NO: 25569 - RNA, 138 nt, synthetic construct; identical to SEQ ID NO: 24759
  source 1..138: mol_type = other RNA

SEQ ID NO: 25570 - RNA, 137 nt, synthetic construct; identical to SEQ ID NO: 24760
  source 1..137: mol_type = other RNA

SEQ ID NO: 25571 - RNA, 136 nt, synthetic construct; identical to SEQ ID NO: 24761
  source 1..136: mol_type = other RNA

SEQ ID NO: 25572 - RNA, 135 nt, synthetic construct; identical to SEQ ID NO: 24762
  source 1..135: mol_type = other RNA

SEQ ID NO: 25573 - RNA, 134 nt, synthetic construct; identical to SEQ ID NO: 24763
  source 1..134: mol_type = other RNA

SEQ ID NO: 25574 - RNA, 133 nt, synthetic construct; identical to SEQ ID NO: 24764
  source 1..133: mol_type = other RNA

SEQ ID NO: 25575 - RNA, 132 nt, synthetic construct; identical to SEQ ID NO: 24765
  source 1..132: mol_type = other RNA

SEQ ID NO: 25576 - RNA, 131 nt, synthetic construct; identical to SEQ ID NO: 24766
  source 1..131: mol_type = other RNA

SEQ ID NO: 25577 - RNA, 130 nt, synthetic construct; identical to SEQ ID NO: 24767
  source 1..130: mol_type = other RNA

SEQ ID NO: 25578 - RNA, 129 nt, synthetic construct; identical to SEQ ID NO: 24768
  source 1..129: mol_type = other RNA

SEQ ID NO: 25579 - RNA, 136 nt, synthetic construct; identical to SEQ ID NO: 24769
  source 1..136: mol_type = other RNA

SEQ ID NO: 25580 - RNA, 135 nt, synthetic construct; identical to SEQ ID NO: 24770
  source 1..135: mol_type = other RNA

SEQ ID NO: 25581 - RNA, 134 nt, synthetic construct; identical to SEQ ID NO: 24771
  source 1..134: mol_type = other RNA

SEQ ID NO: 25582 - RNA, 133 nt, synthetic construct; identical to SEQ ID NO: 24772
  source 1..133: mol_type = other RNA

SEQ ID NO: 25583 - RNA, 132 nt, synthetic construct; identical to SEQ ID NO: 24773
  source 1..132: mol_type = other RNA

SEQ ID NO: 25584 - RNA, 131 nt, synthetic construct; identical to SEQ ID NO: 24774
  source 1..131: mol_type = other RNA

SEQ ID NO: 25585 - RNA, 130 nt, synthetic construct; identical to SEQ ID NO: 24775
  source 1..130: mol_type = other RNA

SEQ ID NO: 25586 - RNA, 129 nt, synthetic construct; identical to SEQ ID NO: 24776
  source 1..129: mol_type = other RNA

SEQ ID NO: 25587 - RNA, 128 nt, synthetic construct; identical to SEQ ID NO: 24777
  source 1..128: mol_type = other RNA

SEQ ID NO: 25588 - RNA, 127 nt, synthetic construct; identical to SEQ ID NO: 24778
  source 1..127: mol_type = other RNA

SEQ ID NO: 25589 - RNA, 134 nt, synthetic construct; identical to SEQ ID NO: 24779
  source 1..134: mol_type = other RNA

SEQ ID NO: 25590 - RNA, 133 nt, synthetic construct; identical to SEQ ID NO: 24780
  source 1..133: mol_type = other RNA

SEQ ID NO: 25591 - RNA, 132 nt, synthetic construct; identical to SEQ ID NO: 24781
  source 1..132: mol_type = other RNA

SEQ ID NO: 25592 - RNA, 131 nt, synthetic construct; identical to SEQ ID NO: 24782
  source 1..131: mol_type = other RNA

SEQ ID NO: 25593 - RNA, 130 nt, synthetic construct; identical to SEQ ID NO: 24783
  source 1..130: mol_type = other RNA

SEQ ID NO: 25594 - RNA, 129 nt, synthetic construct; identical to SEQ ID NO: 24784
  source 1..129: mol_type = other RNA

SEQ ID NO: 25595 - RNA, 128 nt, synthetic construct; identical to SEQ ID NO: 24785
  source 1..128: mol_type = other RNA

SEQ ID NO: 25596 - RNA, 127 nt, synthetic construct; identical to SEQ ID NO: 24786
  source 1..127: mol_type = other RNA

SEQ ID NO: 25597 - RNA, 126 nt, synthetic construct; identical to SEQ ID NO: 24787
  source 1..126: mol_type = other RNA

SEQ ID NO: 25598 - RNA, 125 nt, synthetic construct; identical to SEQ ID NO: 24788
  source 1..125: mol_type = other RNA

SEQ ID NO: 25599 - RNA, 162 nt, synthetic construct; identical to SEQ ID NO: 24789
  source 1..162: mol_type = other RNA

SEQ ID NO: 25600 - RNA, 161 nt, synthetic construct; identical to SEQ ID NO: 24790
  source 1..161: mol_type = other RNA

SEQ ID NO: 25601 - RNA, 160 nt, synthetic construct; identical to SEQ ID NO: 24791
  source 1..160: mol_type = other RNA

SEQ ID NO: 25602 - RNA, 159 nt, synthetic construct; identical to SEQ ID NO: 24792
  source 1..159: mol_type = other RNA

SEQ ID NO: 25603 - RNA, 158 nt, synthetic construct; identical to SEQ ID NO: 24793
  source 1..158: mol_type = other RNA

SEQ ID NO: 25604 - RNA, 157 nt, synthetic construct; identical to SEQ ID NO: 24794
  source 1..157: mol_type = other RNA

SEQ ID NO: 25605 - RNA, 156 nt, synthetic construct; identical to SEQ ID NO: 24795
  source 1..156: mol_type = other RNA

SEQ ID NO: 25606 - RNA, 155 nt, synthetic construct; identical to SEQ ID NO: 24796
  source 1..155: mol_type = other RNA

SEQ ID NO: 25607 - RNA, 154 nt, synthetic construct; identical to SEQ ID NO: 24797
  source 1..154: mol_type = other RNA

SEQ ID NO: 25608 - RNA, 153 nt, synthetic construct; identical to SEQ ID NO: 24798
  source 1..153: mol_type = other RNA

SEQ ID NO: 25609 - RNA, 157 nt, synthetic construct; identical to SEQ ID NO: 24799
  source 1..157: mol_type = other RNA

SEQ ID NO: 25610 - RNA, 156 nt, synthetic construct; identical to SEQ ID NO: 24800
  source 1..156: mol_type = other RNA

SEQ ID NO: 25611 - RNA, 155 nt, synthetic construct; identical to SEQ ID NO: 24801
  source 1..155: mol_type = other RNA

SEQ ID NO: 25612 - RNA, 154 nt, synthetic construct; identical to SEQ ID NO: 24802
  source 1..154: mol_type = other RNA

SEQ ID NO: 25613 - RNA, 153 nt, synthetic construct; identical to SEQ ID NO: 24803
  source 1..153: mol_type = other RNA

SEQ ID NO: 25614 - RNA, 152 nt, synthetic construct; identical to SEQ ID NO: 24804
  source 1..152: mol_type = other RNA

SEQ ID NO: 25615 - RNA, 151 nt, synthetic construct; identical to SEQ ID NO: 24805
  source 1..151: mol_type = other RNA

SEQ ID NO: 25616 - RNA, 150 nt, synthetic construct; identical to SEQ ID NO: 24806
  source 1..150: mol_type = other RNA

SEQ ID NO: 25617 - RNA, 149 nt, synthetic construct; identical to SEQ ID NO: 24807
  source 1..149: mol_type = other RNA

SEQ ID NO: 25618 - RNA, 148 nt, synthetic construct; identical to SEQ ID NO: 24808
  source 1..148: mol_type = other RNA

SEQ ID NO: 25619 - RNA, 152 nt, synthetic construct; identical to SEQ ID NO: 24809
  source 1..152: mol_type = other RNA

SEQ ID NO: 25620 - RNA, 151 nt, synthetic construct; identical to SEQ ID NO: 24810
  source 1..151: mol_type = other RNA

SEQ ID NO: 25621 - RNA, 150 nt, synthetic construct; identical to SEQ ID NO: 24811
  source 1..150: mol_type = other RNA

SEQ ID NO: 25622 - RNA, 149 nt, synthetic construct; identical to SEQ ID NO: 24812
  source 1..149: mol_type = other RNA

SEQ ID NO: 25623 - RNA, 148 nt, synthetic construct; identical to SEQ ID NO: 24813
  source 1..148: mol_type = other RNA

SEQ ID NO: 25624 - RNA, 147 nt, synthetic construct; identical to SEQ ID NO: 24814
  source 1..147: mol_type = other RNA

SEQ ID NO: 25625 - RNA, 146 nt, synthetic construct; identical to SEQ ID NO: 24815
  source 1..146: mol_type = other RNA

SEQ ID NO: 25626 - RNA, 145 nt, synthetic construct; identical to SEQ ID NO: 24816
  source 1..145: mol_type = other RNA

SEQ ID NO: 25627 - RNA, 144 nt, synthetic construct; identical to SEQ ID NO: 24817
  source 1..144: mol_type = other RNA

SEQ ID NO: 25628 - RNA, 143 nt, synthetic construct; identical to SEQ ID NO: 24818
  source 1..143: mol_type = other RNA

SEQ ID NO: 25629 - RNA, 146 nt, synthetic construct; identical to SEQ ID NO: 24819
  source 1..146: mol_type = other RNA

SEQ ID NO: 25630 - RNA, 145 nt, synthetic construct; identical to SEQ ID NO: 24820
  source 1..145: mol_type = other RNA

SEQ ID NO: 25631 - RNA, 144 nt, synthetic construct; identical to SEQ ID NO: 24821
  source 1..144: mol_type = other RNA

SEQ ID NO: 25632 - RNA, 143 nt, synthetic construct; identical to SEQ ID NO: 24822
  source 1..143: mol_type = other RNA

SEQ ID NO: 25633 - RNA, 142 nt, synthetic construct; identical to SEQ ID NO: 24823
  source 1..142: mol_type = other RNA

SEQ ID NO: 25634 - RNA, 141 nt, synthetic construct; identical to SEQ ID NO: 24824
  source 1..141: mol_type = other RNA

SEQ ID NO: 25635 - RNA, 140 nt, synthetic construct; identical to SEQ ID NO: 24825
  source 1..140: mol_type = other RNA

SEQ ID NO: 25636 - RNA, 139 nt, synthetic construct; identical to SEQ ID NO: 24826
  source 1..139: mol_type = other RNA

SEQ ID NO: 25637 - RNA, 138 nt, synthetic construct; identical to SEQ ID NO: 24827
  source 1..138: mol_type = other RNA

SEQ ID NO: 25638 - RNA, 137 nt, synthetic construct; identical to SEQ ID NO: 24828
  source 1..137: mol_type = other RNA

SEQ ID NO: 25639 - RNA, 143 nt, synthetic construct; identical to SEQ ID NO: 24829
  source 1..143: mol_type = other RNA

SEQ ID NO: 25640 - RNA, 142 nt, synthetic construct; identical to SEQ ID NO: 24830
  source 1..142: mol_type = other RNA

SEQ ID NO: 25641 - RNA, 141 nt, synthetic construct; identical to SEQ ID NO: 24831
  source 1..141: mol_type = other RNA

SEQ ID NO: 25642 - RNA, 140 nt, synthetic construct; identical to SEQ ID NO: 24832
  source 1..140: mol_type = other RNA

SEQ ID NO: 25643 - RNA, 139 nt, synthetic construct; identical to SEQ ID NO: 24833
  source 1..139: mol_type = other RNA

SEQ ID NO: 25644 - RNA, 138 nt, synthetic construct; identical to SEQ ID NO: 24834
  source 1..138: mol_type = other RNA

SEQ ID NO: 25645 - RNA, 137 nt, synthetic construct; identical to SEQ ID NO: 24835
  source 1..137: mol_type = other RNA

SEQ ID NO: 25646 - RNA, 136 nt, synthetic construct; identical to SEQ ID NO: 24836
  source 1..136: mol_type = other RNA

SEQ ID NO: 25647 - RNA, 135 nt, synthetic construct; identical to SEQ ID NO: 24837
  source 1..135: mol_type = other RNA

SEQ ID NO: 25648 - RNA, 134 nt, synthetic construct; identical to SEQ ID NO: 24838
  source 1..134: mol_type = other RNA

SEQ ID NO: 25649 - RNA, 141 nt, synthetic construct; identical to SEQ ID NO: 24839
  source 1..141: mol_type = other RNA

SEQ ID NO: 25650 - RNA, 140 nt, synthetic construct; identical to SEQ ID NO: 24840
  source 1..140: mol_type = other RNA

SEQ ID NO: 25651 - RNA, 139 nt, synthetic construct; identical to SEQ ID NO: 24841
  source 1..139: mol_type = other RNA

SEQ ID NO: 25652 - RNA, 138 nt, synthetic construct; identical to SEQ ID NO: 24842
  source 1..138: mol_type = other RNA

SEQ ID NO: 25653 - RNA, 137 nt, synthetic construct; identical to SEQ ID NO: 24843
  source 1..137: mol_type = other RNA

SEQ ID NO: 25654 - RNA, 136 nt, synthetic construct; identical to SEQ ID NO: 24844
  source 1..136: mol_type = other RNA

SEQ ID NO: 25655 - RNA, 135 nt, synthetic construct; identical to SEQ ID NO: 24845
  source 1..135: mol_type = other RNA

SEQ ID NO: 25656 - RNA, 134 nt, synthetic construct; identical to SEQ ID NO: 24846
  source 1..134: mol_type = other RNA

SEQ ID NO: 25657 - RNA, 133 nt, synthetic construct; identical to SEQ ID NO: 24847
  source 1..133: mol_type = other RNA

SEQ ID NO: 25658 - RNA, 132 nt, synthetic construct; identical to SEQ ID NO: 24848
  source 1..132: mol_type = other RNA

SEQ ID NO: 25659 - RNA, 139 nt, synthetic construct; identical to SEQ ID NO: 24849
  source 1..139: mol_type = other RNA

SEQ ID NO: 25660 - RNA, 138 nt, synthetic construct; identical to SEQ ID NO: 24850
  source 1..138: mol_type = other RNA

SEQ ID NO: 25661 - RNA, 137 nt, synthetic construct; identical to SEQ ID NO: 24851
  source 1..137: mol_type = other RNA

SEQ ID NO: 25662 - RNA, 136 nt, synthetic construct; identical to SEQ ID NO: 24852
  source 1..136: mol_type = other RNA

SEQ ID NO: 25663 - RNA, 135 nt, synthetic construct; identical to SEQ ID NO: 24853
  source 1..135: mol_type = other RNA

SEQ ID NO: 25664 - RNA, 134 nt, synthetic construct; identical to SEQ ID NO: 24854
  source 1..134: mol_type = other RNA

SEQ ID NO: 25665 - RNA, 133 nt, synthetic construct; identical to SEQ ID NO: 24855
  source 1..133: mol_type = other RNA

SEQ ID NO: 25666 - RNA, 132 nt, synthetic construct; identical to SEQ ID NO: 24856
  source 1..132: mol_type = other RNA

SEQ ID NO: 25667 - RNA, 131 nt, synthetic construct; identical to SEQ ID NO: 24857
  source 1..131: mol_type = other RNA

SEQ ID NO: 25668 - RNA, 130 nt, synthetic construct; identical to SEQ ID NO: 24858
  source 1..130: mol_type = other RNA

SEQ ID NO: 25669 - RNA, 137 nt, synthetic construct; identical to SEQ ID NO: 24859
  source 1..137: mol_type = other RNA

SEQ ID NO: 25670 - RNA, 136 nt, synthetic construct; identical to SEQ ID NO: 24860
  source 1..136: mol_type = other RNA

SEQ ID NO: 25671 - RNA, 135 nt, synthetic construct; identical to SEQ ID NO: 24861
  source 1..135: mol_type = other RNA

SEQ ID NO: 25672 - RNA, 134 nt, synthetic construct; identical to SEQ ID NO: 24862
  source 1..134: mol_type = other RNA

SEQ ID NO: 25673 - RNA, 133 nt, synthetic construct; identical to SEQ ID NO: 24863
  source 1..133: mol_type = other RNA

SEQ ID NO: 25674 - RNA, 132 nt, synthetic construct; identical to SEQ ID NO: 24864
  source 1..132: mol_type = other RNA

SEQ ID NO: 25675 - RNA, 131 nt, synthetic construct; identical to SEQ ID NO: 24865
  source 1..131: mol_type = other RNA

SEQ ID NO: 25676 - RNA, 130 nt, synthetic construct; identical to SEQ ID NO: 24866
  source 1..130: mol_type = other RNA

SEQ ID NO: 25677 - RNA, 129 nt, synthetic construct; identical to SEQ ID NO: 24867
  source 1..129: mol_type = other RNA

SEQ ID NO: 25678 - RNA, 128 nt, synthetic construct; identical to SEQ ID NO: 24868
  source 1..128: mol_type = other RNA

SEQ ID NO: 25679 - RNA, 135 nt, synthetic construct; identical to SEQ ID NO: 24869
  source 1..135: mol_type = other RNA

SEQ ID NO: 25680 - RNA, 134 nt, synthetic construct; identical to SEQ ID NO: 24870
  source 1..134: mol_type = other RNA

SEQ ID NO: 25681 - RNA, 133 nt, synthetic construct; identical to SEQ ID NO: 24871
  source 1..133: mol_type = other RNA

SEQ ID NO: 25682 - RNA, 132 nt, synthetic construct; identical to SEQ ID NO: 24872
  source 1..132: mol_type = other RNA

SEQ ID NO: 25683 - RNA, 131 nt, synthetic construct; identical to SEQ ID NO: 24873
  source 1..131: mol_type = other RNA

SEQ ID NO: 25684 - RNA, 130 nt, synthetic construct; identical to SEQ ID NO: 24874
  source 1..130: mol_type = other RNA

SEQ ID NO: 25685 - RNA, 129 nt, synthetic construct; identical to SEQ ID NO: 24875
  source 1..129: mol_type = other RNA

SEQ ID NO: 25686 - RNA, 128 nt, synthetic construct; identical to SEQ ID NO: 24876
  source 1..128: mol_type = other RNA

SEQ ID NO: 25687 - RNA, 127 nt, synthetic construct; identical to SEQ ID NO: 24877
  source 1..127: mol_type = other RNA

SEQ ID NO: 25688 - RNA, 126 nt, synthetic construct; identical to SEQ ID NO: 24878
  source 1..126: mol_type = other RNA

SEQ ID NO: 25689 - protein, 18 aa, synthetic construct
SGGSSGGSSGSETPGTSE

SEQ ID NO: 25690 - protein, 4 aa, unidentified
YADD

SEQ ID NO: 25691 - protein, 4 aa, unidentified
YMDD

SEQ ID NO: 25692 - protein, 4 aa, unidentified
YVDD

SEQ ID NO: 25693 - protein, 9 aa, unidentified
LAGLIDADG

SEQ ID NO: 25694 - protein, 4 aa, synthetic construct
SGGS

SEQ ID NO: 25695 - RNA, 60 nt, synthetic construct
  source 1..60: mol_type = other RNA
aaaaaaaaaaaaaaaaaaaaaaaaaaaaaaaaaaaaaaaaaaaaaaaaaaaaaaaaaaaa

SEQ ID NO: 25696 - RNA, 20 nt, synthetic construct
  source 1..20: mol_type = other RNA
acacaaataccagtccagcg

SEQ ID NO: 25697 - RNA, 100 nt, synthetic construct
  source 1..100: mol_type = other RNA
  misc_difference 1..100: note = This sequence may encompass 5, 10, 20, 30, 50, 70, 100 nucleotides
aaaaaaaaaaaaaaaaaaaaaaaaaaaaaaaaaaaaaaaaaaaaaaaaaaaaaaaaaaaaaaaaaaaaaaaaaaaaaaaaaaaaaaaaaaaaaaaaaaaa
